(19) United States
(12) Patent Application Publication
(10) Pub. No.: US 2021/0380691 A1
(43) Pub. Date: Dec. 9, 2021

(54) MULTIFUNCTIONAL MOLECULES THAT BIND TO T CELLS AND USES THEREOF TO TREAT AUTOIMMUNE DISORDERS

(71) Applicant: Marengo Therapeutics, Inc., Cambridge, MA (US)

(72) Inventors: Andreas Loew, Boston, MA (US); Seng-Lai Tan, Sudbury, MA (US); Jonathan Hsu, Waltham, MA (US); Brian Edward Vash, Cambridge, MA (US); Stephanie J. Maiocco, Arlington, MA (US); Nidhi Malhotra, Boston, MA (US); Madan Katragadda, Acton, MA (US)

(21) Appl. No.: 17/402,318

(22) Filed: Aug. 13, 2021

Related U.S. Application Data
(63) Continuation of application No. PCT/US2020/019321, filed on Feb. 21, 2020.
(60) Provisional application No. 62/808,713, filed on Feb. 21, 2019.
(60) Provisional application No. 62/957,045, filed on Jan. 3, 2020.

(51) Int. Cl. C07K 16/28; G01N 33/574

(52) U.S. Cl. CPC C07K 16/2809; C07K 16/2803; G01N 33/574; C07K 2317/24; C07K 2317/92; C07K 2317/732; C07K 2317/734; C07K 2317/31

(57) ABSTRACT

Multifunctional molecules that include i) an antigen binding domain that binds to a TCR variable beta chain (TCRBV) antigen; and one, two or all of: (ii) an immune cell engager (e.g., chosen from an NK cell engager, a T cell engager, a B cell engager, a dendritic cell engager, or a macrophage cell engager); (iii) a cytokine molecule or cytokine inhibitor molecule; and/or (iv) a death receptor signal enhancer. Additionally, disclosed are nucleic acids encoding the same, methods of producing the aforesaid molecules, and methods of treating autoimmune diseases using the aforesaid molecules.

### RELATED APPLICATIONS

[0001] This application is a continuation of International Application No. PCT/US2020/019321, filed on Feb. 21, 2020, which claims the benefit of U.S. Provisional Application 62/808,713 filed on Feb. 21, 2019 and U.S. Provisional Application 62/957,045 filed on Jan. 3, 2020, the entire contents of each of which are hereby incorporated by reference.

### SEQUENCE LISTING

[0002] The instant application contains a Sequence Listing which has been submitted electronically in ASCII format and is hereby incorporated by reference in its entirety. Said ASCII copy, created on Feb. 19, 2020, is named 53676-734.301_SL.txt and is 1,519,578 bytes in size.

### BACKGROUND

[0003] T cell mediated antigen recognition depends on the interaction of the T cell receptor (TCR) with the antigen-major histocompatibility complex (MHC). The heterodimeric TCRs consist of a combination of α and β chains (αβ TCR) expressed by the majority of T cells, or γδ chains (γδ TCR) present only in about 1-5% of the T cells. A highly diverse TCR repertoire is a fundamental property of an effective immune system. However, the immune repertoire can change greatly with the onset and progression of diseases, such as cancer, autoimmune, inflammatory, and infectious diseases.

[0004] Autoimmunity may result from abnormal regulation of the immune system. This may be manifested by autoreactive TCR clones that attack a patient's own cells. There is a need for improved therapies for autoimmune diseases.

### SUMMARY OF THE INVENTION

[0005] The disclosure relates, inter alia, to novel multispecific or multifunctional molecules that include (i) an antigen binding domain that binds to a TCR variable beta chain (TCRBV) antigen on a T cell (e.g., a TCRBV antigen corresponding to a biased TCRBV clonotype); and one, two or all of: (ii) an immune cell engager (e.g., chosen from an NK cell engager, a T cell engager, a B cell engager, a dendritic cell engager, or a macrophage cell engager); (iii) a cytokine molecule; and/or (iv) a stromal modifying moiety. The terms “multispecific” or “multifunctional” are used interchangeably herein.

[0006] Without wishing to be bound by theory, a TCR bias may exist in autoimmune diseases. This bias may be associated with dominant autoreactive TCR clones responsible for disease or associated with symptoms. Re-balancing the TCR repertoire, e.g., by eliminating or depleting T cells comprising an autoreactive clonotype, may treat the associated autoimmune disease and/or reduce symptoms of the autoimmune disease. Accordingly, the multispecific or multifunctional molecules disclosed herein are expected to target (e.g., localize, bridge and/or activate) an immune cell (e.g., an immune effector cell chosen from an NK cell, a T cell, a B cell, a dendritic cell or a macrophage), at a target cell (e.g., a T cell comprising a biased TCRBV clonotype or comprising a TCRBV antigen corresponding to a biased TCRBV clonotype). Increasing the proximity and/or activity of the immune cell using the multispecific molecules described herein is expected to enhance an immune response against the target cell (e.g., the T cell comprising a TCRBV, e.g., TCRBV antigen (e.g., a TCRBV antigen corresponding to a biased TCRBV clonotype), thereby providing a more effective therapy (e.g., a more effective autoimmune disease therapy). Without being bound by theory, a targeted, localized immune response against the target cell (e.g., a T cell comprising a biased TCRBV clonotype, e.g., and not T cells not comprising the biased TCRBV clonotype) is believed to reduce the effects of systemic toxicity of the multispecific molecules described herein. A targeted immune response against the autoreactive T cell population that targets non-autoreactive T cells to a lesser degree (e.g., does not target non-autoreactive T cells) is believed to have fewer deleterious effects than systemic ablation of all T cells.

[0007] Accordingly, provided herein are, inter alia, multispecific molecules (e.g., multispecific or multifunctional antibody molecules) that include the aforesaid moieties, nucleic acids encoding the same, methods of producing the aforesaid molecules, and methods of treating autoimmune disease using the aforesaid molecules. Also provided herein are anti-TCRβV antibody molecules, nucleic acids encoding the same, methods of producing the aforesaid molecules, and methods of treating autoimmune disease using the anti-TCRβV antibody molecules.

[0008] Further provided are methods for depletion (e.g., in vivo depletion) of biased TCRBV clonotypes, e.g., in the context of autoimmune disease with a multispecific molecule or an anti-TCRβV antibody molecule. In some embodiments, the method involves identifying in a patient a clonal bias in TCRBV usage, e.g., associated with the autoreactive subpopulation, and responsive to this analysis administering a multifunctional molecule targeted to the TCRBV antigen corresponding to the biased TCRBV clonotype to decrease, e.g., eliminate, the clonal bias and promote, e.g., establish, a normal TCRBV distribution.

[0009] Accordingly, in one aspect, the disclosure features a multifunctional molecule, comprising:

(i) a first antigen binding domain that binds to, e.g., selectively binds to, T cell receptor variable beta (TCRBV), e.g., a TCRBV antigen, and
(ii) one, two, or all of:
(a) an immune cell engager chosen from an NK cell engager, a T cell engager, a B cell engager, a dendritic cell engager, or a macrophage cell engager;
(b) a cytokine molecule or cytokine inhibitor molecule; and
(c) a death receptor signal engager.

[0010] In some embodiments, first antigen binding domain comprises an anti-TCRβV antibody molecule, e.g., as described herein.

[0011] In another aspect, the disclosure features a nucleic acid molecule encoding a multifunctional molecule disclosed herein.

[0012] In another aspect, the disclosure features a vector, e.g., an expression vector, comprising the nucleic acid molecules disclosed herein.

[0013] In another aspect, the disclosure features a host cell comprising a nucleic acid molecule or vector disclosed herein.

[0014] In another aspect, the disclosure features a method of making, e.g., producing, a multifunctional molecule disclosed herein, comprising culturing a host cell disclosed herein under suitable conditions, e.g., conditions suitable for gene expression and/or homo- or heterodimerization.

[0015] In another aspect, the disclosure features a pharmaceutical composition comprising a multifunctional molecule disclosed herein.

[0016] In another aspect, the disclosure features a method of treating a TCR bias, comprising administering to a subject in need thereof a multifunctional molecule disclosed herein, wherein the multifunctional molecule is administered in an amount effective to treat the TCR bias.

[0017] In another aspect, the disclosure features a method of treating an autoimmune disease (e.g., an autoimmune disease associated with a TCR bias), comprising administering to a subject in need thereof a multifunctional molecule disclosed herein, wherein the multifunctional molecule is administered in an amount effective to treat the autoimmune disease.

[0018] In another aspect, the disclosure features a method of identifying a subject in need of treatment for TCR bias or an autoimmune disease (e.g., associated with a TCR bias) using a multifunctional molecule disclosed herein, comprising determining (e.g., directly determining or indirectly determining, e.g., obtaining information regarding) whether a subject has a TCR bias (e.g., a biased TCRBV clonotype) and/or an autoimmune disease associated with said bias, wherein:

responsive to determining that the subject has a TCR bias (e.g., a biased TCRBV clonotype) and/or an autoimmune disease associated with said bias, identifying the subject as a candidate for treatment using a multifunctional molecule comprising an antigen binding domain that binds to the TCRBV antigen.

[0019] In another aspect, the disclosure features a method of evaluating a subject in need of treatment for a TCR bias (e.g., a biased TCRBV clonotype) and/or an autoimmune disease associated with said bias, comprising determining (e.g., directly determining or indirectly determining, e.g., obtaining information regarding) whether a subject has a TCR bias (e.g., a biased TCRBV clonotype).

[0020] In yet another aspect, disclosed herein is a method of treating an autoimmune disease (e.g., an autoimmune disease associated with a TCR bias), in a subject in need thereof, comprising administering to said subject an effective amount, e.g., a therapeutically effective amount, of an antibody molecule which binds (e.g., specifically binds) to a T cell receptor beta variable region (TCRβV) (“anti-TCRβV antibody molecule”), thereby treating the disorder.

[0021] In another aspect, the disclosure provides a method of depleting a population of T cells in a subject having an autoimmune disorder (e.g., an autoimmune disease associated with a TCR bias), comprising, contacting the T cell population with an effective amount of an antibody molecule which binds (e.g., specifically binds) to a T cell receptor beta variable region (TCRβV) (“anti-TCRβV antibody molecule”).

[0022] In some embodiments, the contacting occurs in vivo or in vitro.

[0023] In some embodiments, the anti-TCRβV antibody molecule is not an antibody molecule disclosed in U.S. Pat. No. 5,861,155.

[0024] In some embodiments, the anti-TCRβV antibody molecule binds to TCRβ V12 with an affinity and/or binding specificity that is less than (e.g., less than about 10%, 20%, 30%, 40%, 50%, 60%, 70%, 80%, 90% or about 2-, 5-, or 10-fold) the affinity and/or binding specificity of the 16G8 murine antibody or a humanized version thereof as described in U.S. Pat. No. 5,861,155.

[0025] In some embodiments, the anti-TCRβV antibody molecule binds to TCRβ V12 with an affinity and/or binding specificity that is greater than (e.g., greater than about 10%, 20%, 30%, 40%, 50%, 60%, 70%, 80%, 90% or about 2-, 5-, or 10-fold) the affinity and/or binding specificity of the 16G8 murine antibody or a humanized version thereof as described in U.S. Pat. No. 5,861,155.

[0026] In some embodiments, the anti-TCRβV antibody molecule binds to TCRβ V5-5*01 or TCRβ V5-1*01 with an affinity and/or binding specificity that is greater than (e.g., greater than about 10%, 20%, 30%, 40%, 50%, 60%, 70%, 80%, 90% or about 2-, 5-, or 10-fold) the affinity and/or binding specificity of the TM23 murine antibody or a humanized version thereof as described in U.S. Pat. No. 5,861,155.

[0027] In some embodiments, the anti-TCRβV antibody molecule binds to TCRβ V5-5*01 or TCRβ V5-1*01 with an affinity and/or binding specificity that is greater than (e.g., greater than about 10%, 20%, 30%, 40%, 50%, 60%, 70%, 80%, 90% or about 2-, 5-, or 10-fold) the affinity and/or binding specificity of the TM23 murine antibody or a humanized version thereof as described in U.S. Pat. No. 5,861,155.

[0028] In some embodiments, the anti-TCRβV antibody molecule comprises an Fc region, e.g., an Fc region having effector function, e.g., antibody dependent cell-mediated cytotoxicity (ADCC), Antibody-dependent cellular phagocytosis (ADCP) and/or complement dependent cytotoxicity (CDC).

[0029] In some embodiments, the anti-TCRβV antibody molecule, the anti-TCRβV antibody molecule comprises an Fc region with enhanced effector function, e.g., as compared to a wildtype Fc region.

[0030] In some embodiments, the anti-TCRβV antibody molecule, the anti-TCRβV antibody molecule comprises a human IgG1 region or a human IgG4 region.

[0031] In another aspect, the disclosure features a nucleic acid molecule encoding an anti-TCRβV antibody molecule disclosed herein.

[0032] In another aspect, the disclosure features a vector, e.g., an expression vector, comprising the nucleic acid molecules disclosed herein.

[0033] In another aspect, the disclosure features a host cell comprising a nucleic acid molecule or vector disclosed herein.

[0034] In another aspect, the disclosure features a method of making, e.g., producing, an anti-TCRβV antibody molecule disclosed herein, comprising culturing a host cell disclosed herein under suitable conditions, e.g., conditions suitable for gene expression and/or homo- or heterodimerization.

[0035] In another aspect, the disclosure features a pharmaceutical composition comprising an anti-TCRβV antibody molecule disclosed herein.

[0036] Additional features of any of the aforesaid multifunctional molecules, nucleic acids, vectors, host cells, or methods include one or more of the following enumerated embodiments.

[0037] Those skilled in the art will recognize, or be able to ascertain using no more than routine experimentation, many equivalents to the specific embodiments of the invention described herein. Such equivalents are intended to be encompassed by the following enumerated embodiments.

### ENUMERATED EMBODIMENTS

[0038] 1. A multifunctional molecule, comprising:

(i) a first antigen binding domain that binds to, e.g., selectively binds to, T cell receptor variable beta (TCRBV), e.g., a TCRBV antigen,
and
(ii) one, two, or all of:

[0039] (a) an immune cell engager chosen from an NK cell engager, a T cell engager, a B cell engager, a dendritic cell engager, or a macrophage cell engager;

[0040] (b) a cytokine molecule or cytokine inhibitor molecule; and

[0041] (c) a death receptor signal engager.

[0042] 2. The multifunctional molecule of embodiment 1, wherein the TCRBV antigen corresponds to a biased TCRBV clonotype, e.g., present in a subject, e.g., a patient, e.g., a subject or a patient with an autoimmune disease.

[0043] 3. The multifunctional molecule of any preceding embodiment, wherein the multifunctional molecule:

(i) binds specifically to a TCRBV antigen, e.g., the same or similar epitope as the epitope recognized by an anti-TCRBV antibody molecule as described herein;
(ii) shows the same or similar binding affinity or specificity, or both, as an anti-TCRBV antibody molecule as described herein;
(iii) inhibits, e.g., competitively inhibits, the binding of an anti-TCRBV antibody molecule as described herein;
(iv) binds the same or an overlapping epitope with an anti-TCRBV antibody molecule as described herein; or
(v) competes for binding, and/or binds the same epitope, with an anti-TCRBV antibody molecule as described herein.

[0044] 4. The multifunctional molecule of embodiment 3, wherein the antigen binding domain comprises one or more CDRs, framework regions, variable domains, heavy or light chains, or an antigen binding domain chosen from Tables 13 or 14, or a sequence substantially identical thereto.

[0045] 5. The multifunctional molecule of any of embodiments 1-4, wherein the antigen binding domain specifically binds to TCRβ V6 (e.g., TCRβ V6-5*01).

[0046] 6. The multifunctional molecule of embodiment 5, wherein the antigen binding domain comprises at least one (e.g., one, two, three, or four) variable region or an antigen-binding fragment thereof, from Antibody A-H.1 or Antibody A-H.2, or as described in Table 1A, or encoded by the nucleotide sequence in Table 1A, or a sequence substantially identical (e.g., at least 80%, 85%, 90%, 92%, 95%, 97%, 98%, 99% or higher identical) to any of the aforesaid sequences.

[0047] 7. The multifunctional molecule of either of embodiments 5 or 6, wherein the antigen binding domain comprises at least one, two, or three CDRs (or collectively all of the CDRs) from a heavy chain variable region comprising an amino acid sequence shown in Table 1A, or encoded by a nucleotide sequence shown in Table 1A (or a sequence with one, two, three, four, five, six or more changes, e.g., amino acid substitutions or deletions, relative to the amino acid sequence shown in Table 1A, or encoded by a nucleotide sequence shown in Table 1A).

[0048] 8. The multifunctional molecule of any of embodiments 5-7, wherein the antigen binding domain comprises at least one, two, or three CDRs (or collectively all of the CDRs) from a light chain variable region comprising an amino acid sequence shown in Table 1A, or encoded by a nucleotide sequence shown in Table 1A (or a sequence with one, two, three, four, five, six or more changes, e.g., amino acid substitutions or deletions, relative to the amino acid sequence shown in Table 1A, or encoded by a nucleotide sequence shown in Table 1A).

[0049] 9. The multifunctional molecule of any of embodiments 5-8, wherein the antigen binding domain comprises:

(i) one, two or all of a light chain complementarity determining region 1 (LC CDR1), a light chain complementarity determining region 2 (LC CDR2), and a light chain complementarity determining region 3 (LC CDR3) of SEQ ID NO: 2, SEQ ID NO: 10 or SEQ ID NO: 11, and/or
(ii) one, two or all of a heavy chain complementarity determining region 1 (HC CDR1), heavy chain complementarity determining region 2 (HC CDR2), and a heavy chain complementarity determining region 3 (HC CDR3) of SEQ ID NO: 1 or SEQ ID NO: 9.

[0050] 10. The multifunctional molecule of any of embodiments 5-8, wherein the antigen binding domain comprises a LC CDR1, LC CDR2, and LC CDR3 of SEQ ID NO: 2, and a HC CDR1, HC CDR2, and HC CDR3 of SEQ ID NO: 1.

[0051] 11. The multifunctional molecule of any of embodiments 5-8, wherein the antigen binding domain comprises a LC CDR1, LC CDR2, and LC CDR3 of SEQ ID NO: 10, and a HC CDR1, HC CDR2, and HC CDR3 of SEQ ID NO: 9.

[0052] 12. The multifunctional molecule of any of embodiments 5-8, wherein the antigen binding domain comprises a LC CDR1, LC CDR2, and LC CDR3 of SEQ ID NO: 11, and a HC CDR1, HC CDR2, and HC CDR3 of SEQ ID NO: 9.

[0053] 13. The multifunctional molecule of any of embodiments 5-8, wherein the antigen binding domain comprises:

(i) a LC CDR1 amino acid sequence of SEQ ID NO: 6, a LC CDR2 amino acid sequence of SEQ ID NO: 7, or a LC CDR3 amino acid sequence of SEQ ID NO: 8; and/or
(ii) a HC CDR1 amino acid sequence of SEQ ID NO: 3, a HC CDR2 amino acid sequence of SEQ ID NO: 4, or a HC CDR3 amino acid sequence of SEQ ID NO: 5.

[0054] 14. The multifunctional molecule of any of embodiments 5-8, wherein the antigen binding domain comprises:

(i) a light chain variable region (VL) comprising a LC CDR1 amino acid sequence of SEQ ID NO: 6, a LC CDR2 amino acid sequence of SEQ ID NO: 7, or a LC CDR3 amino acid sequence of SEQ ID NO: 8; and/or
(ii) a heavy chain variable region (VH) comprising a HC CDR1 amino acid sequence of SEQ ID NO: 3, a HC CDR2 amino acid sequence of SEQ ID NO: 4, or a HC CDR3 amino acid sequence of SEQ ID NO: 5.

[0055] 15. The multifunctional molecule of any of embodiments 5-8, wherein the antigen binding domain comprises:

(i) a LC CDR1 amino acid sequence of SEQ ID NO: 51, a LC CDR2 amino acid sequence of SEQ ID NO: 52, or a LC CDR3 amino acid sequence of SEQ ID NO: 53; and/or
(ii) a HC CDR1 amino acid sequence of SEQ ID NO: 45, a HC CDR2 amino acid sequence of SEQ ID NO: 46, or a HC CDR3 amino acid sequence of SEQ ID NO: 47.

[0056] 16. The multifunctional molecule of any of embodiments 5-8, wherein the antigen binding domain comprises:

(i) a light chain variable region (VL) comprising a LC CDR1 amino acid sequence of SEQ ID NO: 51, a LC CDR2 amino acid sequence of SEQ ID NO: 52, or a LC CDR3 amino acid sequence of SEQ ID NO: 53; and/or
(ii) a heavy chain variable region (VH) comprising a HC CDR1 amino acid sequence of SEQ ID NO: 45, a HC CDR2 amino acid sequence of SEQ ID NO: 46, or a HC CDR3 amino acid sequence of SEQ ID NO: 47.

[0057] 17. The multifunctional molecule of any of embodiments 5-8, wherein the antigen binding domain comprises:

(i) a LC CDR1 amino acid sequence of SEQ ID NO: 54, a LC CDR2 amino acid sequence of SEQ ID NO: 55, or a LC CDR3 amino acid sequence of SEQ ID NO: 56; and/or
(ii) a HC CDR1 amino acid sequence of SEQ ID NO: 48, a HC CDR2 amino acid sequence of SEQ ID NO: 49, or a HC CDR3 amino acid sequence of SEQ ID NO: 50.

[0058] 18. The multifunctional molecule of any of embodiments 5-8, wherein the antigen binding domain comprises:

(i) a light chain variable region (VL) comprising a LC CDR1 amino acid sequence of SEQ ID NO: 54, a LC CDR2 amino acid sequence of SEQ ID NO: 55, or a LC CDR3 amino acid sequence of SEQ ID NO: 56; and/or
(ii) a heavy chain variable region (VH) comprising a HC CDR1 amino acid sequence of SEQ ID NO: 48, a HC CDR2 amino acid sequence of SEQ ID NO: 49, or a HC CDR3 amino acid sequence of SEQ ID NO: 50.

[0059] 19. The multifunctional molecule of any of embodiments 5-18, wherein the antigen binding domain comprises a light chain variable region (VL) comprising a light chain framework region 1 (VLFWR1) of Antibody A-H.1 or Antibody A-H.2, e.g., as shown in FIG. 1B, e.g., of SEQ ID NOs: 2, 10, or 11.

[0060] 20. The multifunctional molecule of any of embodiments 5-19, wherein the antigen binding domain comprises a light chain variable region (VL) comprising a light chain framework region 2 (VLFWR2) of Antibody A-H.1 or Antibody A-H.2, e.g., as shown in FIG. 1B, e.g., of SEQ ID NOs: 2, 10, or 11.

[0061] 21. The multifunctional molecule of any of embodiments 5-20, wherein the antigen binding domain comprises a light chain variable region (VL) comprising a light chain framework region 3 (VLFWR3) of Antibody A-H.1 or Antibody A-H.2, e.g., as shown in FIG. 1B, e.g., of SEQ ID NOs: 2, 10, or 11.

[0062] 22. The multifunctional molecule of any of embodiments 5-21, wherein the antigen binding domain comprises a light chain variable region (VL) comprising a light chain framework region 4 (VLFWR4) of Antibody A-H.1 or Antibody A-H.2, e.g., as shown in FIG. 1B, e.g., of SEQ ID NOs: 2, 10, or 11.

[0063] 23. The multifunctional molecule of any of embodiments 5-22, wherein the antigen binding domain comprises a light chain variable region (VL) comprising a light chain framework region 1 (VLFWR1), a light chain framework region 2 (VLFWR2), a light chain framework region 3 (VLFWR3), and a light chain framework region 4 (VLFWR4) of SEQ ID NO: 2.

[0064] 24. The multifunctional molecule of any of embodiments 5-22, wherein the antigen binding domain comprises a light chain variable region (VL) comprising a light chain framework region 1 (VLFWR1), a light chain framework region 2 (VLFWR2), a light chain framework region 3 (VLFWR3), and a light chain framework region 4 (VLFWR4) of SEQ ID NO: 10.

[0065] 25. The multifunctional molecule of any of embodiments 5-22, wherein the antigen binding domain comprises a light chain variable region (VL) comprising a light chain framework region 1 (VLFWR1), a light chain framework region 2 (VLFWR2), a light chain framework region 3 (VLFWR3), and a light chain framework region 4 (VLFWR4) of SEQ ID NO: 11.

[0066] 26. The multifunctional molecule of any of embodiments 5-25, wherein the antigen binding domain comprises a light chain variable domain comprising a framework region, e.g., framework region 1 (VLFWR1), comprising a change, e.g., a substitution (e.g., a conservative substitution) at position 10 according to Kabat numbering, wherein the change at position 10 is to Phenylalanine, e.g., a Serine to Phenylalanine substitution.

[0067] 27. The multifunctional molecule of any of embodiments 5-26, wherein the antigen binding domain comprises a light chain variable domain comprising a framework region, e.g., framework region 2 (VLFWR2), comprising one or more (e.g., one or two) changes, e.g., substitutions (e.g., a conservative substitution), at positions selected from 36 and 46 according to Kabat numbering, wherein the change at position 36 is to Histidine, e.g., a Tyrosine to Histidine substitution, and the change at position 46 is to Alanine, e.g., an Arginine to Alanine substitution.

[0068] 28. The multifunctional molecule of any of embodiments 5-27, wherein the antigen binding domain comprises a light chain variable domain comprising a framework region, e.g., framework region 3 (VLFWR3), comprising a change, e.g., substitution (e.g., a conservative substitution), at position 87 according to Kabat numbering, wherein the change at position 87 is to Phenylalanine, e.g., a Tyrosine to Phenylalanine substitution.

[0069] 29. The multifunctional molecule of any of embodiments 5-28, wherein the antigen binding domain comprises a light chain variable domain comprising (a) a framework region 1 (VLFWR1) comprising a Phenylalanine at position 10, e.g., a substitution at position 10 according to Kabat numbering, e.g., a Serine to Phenyalanine substitution; (b) a framework region 2 (VLFWR2) comprising a Histidine at position 36, e.g., a substitution at position 36 according to Kabat numbering, e.g., a Tyrosine to Histidine substitution, and a Alanine at position 46, e.g., a substitution at position 46 according to Kabat numbering, e.g., a Arginine to Alanine substitution; and (c) a framework region 3 (VLFWR3) comprising a Phenylalanine at position 87, e.g., a substitution at position 87 according to Kabat numbering, e.g., a Tyrosine to Phenylalanine substitution, e.g., as shown in the amino acid sequence of SEQ ID NO: 10.

[0070] 30. The multifunctional molecule of any of embodiments 5-28, wherein the antigen binding domain comprises a light chain variable domain comprising (a) a framework region 2 (FR2) comprising a Histidine at position 36, e.g., a substitution at position 36 according to Kabat numbering, e.g., a Tyrosine to Histidine substitution, and a Alanine at position 46, e.g., a substitution at position 46 according to Kabat numbering, e.g., a Arginine to Alanine substitution; and (b) a framework region 3 (FR3) comprising a Phenylalanine at position 87, e.g., a substitution at position 87 according to Kabat numbering, e.g., a Tyrosine to Phenylalanine substitution, e.g., as shown in the amino acid sequence of SEQ ID NO: 11.

[0071] 31. The multifunctional molecule of any of embodiments 5-30, wherein the antigen binding domain comprises a heavy chain variable region (VH) comprising a heavy chain framework region 1 (VHFWR1) of Antibody A-H.1 or Antibody A-H.2, e.g., as shown in FIG. 1A, e.g., of SEQ ID NOs: 1 or 9.

[0072] 32. The multifunctional molecule of any of embodiments 5-31, wherein the antigen binding domain comprises a heavy chain variable region (VH) comprising a heavy chain framework region 2 (VHFWR2) of Antibody A-H.1 or Antibody A-H.2, e.g., as shown in FIG. 1A, e.g., of SEQ ID NOs: 1 or 9.

[0073] 33. The multifunctional molecule of any of embodiments 5-32, wherein the antigen binding domain comprises a heavy chain variable region (VH) comprising a heavy chain framework region 3 (VHFWR3) of Antibody A-H.1 or Antibody A-H.2, e.g., as shown in FIG. 1A, e.g., of SEQ ID NOs: 1 or 9.

[0074] 34. The multifunctional molecule of any of embodiments 5-33, wherein the antigen binding domain comprises a heavy chain variable region (VH) comprising a heavy chain framework region 4 (VHFWR4) of Antibody A-H.1 or Antibody A-H.2, e.g., as shown in FIG. 1A, e.g., of SEQ ID NOs: 1 or 9.

[0075] 35. The multifunctional molecule of any of embodiments 5-34, wherein the antigen binding domain comprises a heavy chain variable region (VH) comprising a heavy chain framework region 1 (VHFWR1), a heavy chain framework region 2 (VHFWR2), a heavy chain framework region 3 (VHFWR3), and a heavy chain framework region 4 (VHFWR4) of SEQ ID NO: 1.

[0076] 36. The multifunctional molecule of any of embodiments 5-34, wherein the antigen binding domain comprises a heavy chain variable region (VH) comprising a heavy chain framework region 1 (VHFWR1), a heavy chain framework region 2 (VHFWR2), a heavy chain framework region 3 (VHFWR3), and a heavy chain framework region 4 (VHFWR4) of SEQ ID NO: 9.

[0077] 37. The multifunctional molecule of any of embodiments 5-36, wherein the antigen binding domain comprises a heavy chain variable domain comprising a framework region, e.g., framework region 3 (VHFWR3), comprising one or more (e.g., one or two) changes, e.g., substitutions (e.g., a conservative substitution), at positions selected from 73 and 94 according to Kabat numbering, wherein the change at position 73 is to Threonine, e.g., a Glutamic Acid to Threonine substitution, and the change at position 94 is to Glycine, e.g., an Arginine to Glycine substitution.

[0078] 38. The multifunctional molecule of any of embodiments 5-37, wherein the antigen binding domain comprises a heavy chain variable domain comprising a framework region 3 (FR3) comprising a Threonine at position 73, e.g., a substitution at position 73 according to Kabat numbering, e.g., a Glutamic Acid to Threonine substitution, and a Glycine at position 94, e.g., a substitution at position 94 according to Kabat numbering, e.g., a Arginine to Glycine substitution, e.g., as shown in the amino acid sequence of SEQ ID NO: 10.

[0079] 39. The multifunctional molecule of any of embodiments 5-18, wherein the antigen binding domain comprises the heavy chain framework regions 1-4 of Antibody A-H.1, e.g., SEQ ID NO: 9; and the light chain framework regions 1-4 of Antibody A-H.1, e.g., SEQ ID NO: 10, or as shown in FIGS. 1A and 1B.

[0080] 40. The multifunctional molecule of any of embodiments 5-18, wherein the antigen binding domain comprises the heavy chain framework regions 1-4 of Antibody A-H.2, e.g., SEQ ID NO: 9; and the light chain framework regions 1-4 of Antibody A-H.2, e.g., SEQ ID NO: 11, or as shown in FIGS. 1A and 1B.

[0081] 41. The multifunctional molecule of any of embodiments 5-18, wherein the antigen binding domain comprises:

a VH domain comprising the amino acid sequence of SEQ ID NO: 9, an amino acid sequence at least about 85%, 90%, 95%, 99% or more identical to the amino acid sequence of SEQ ID NO: 9, or an amino acid sequence which differs by no more than 1, 2, 5, 10, or 15 amino acid residues from the amino acid sequence of SEQ ID NO: 9; and/or
a VL domain comprising the amino acid sequence of SEQ ID NO: 10, an amino acid sequence at least about 85%, 90%, 95%, 99% or more identical to the amino acid sequence of SEQ ID NO: 10, or an amino acid sequence which differs by no more than 1, 2, 5, 10, or 15 amino acid residues from the amino acid sequence of SEQ ID NO: 10.

[0082] 42. The multifunctional molecule of any of embodiments 5-18, wherein the antigen binding domain comprises:

a VH domain comprising the amino acid sequence of SEQ ID NO: 9, an amino acid sequence at least about 85%, 90%, 95%, 99% or more identical to the amino acid sequence of SEQ ID NO: 9, or an amino acid sequence which differs by no more than 1, 2, 5, 10, or 15 amino acid residues from the amino acid sequence of SEQ ID NO: 9; and/or
a VL domain comprising the amino acid sequence of SEQ ID NO: 11, an amino acid sequence at least about 85%, 90%, 95%, 99% or more identical to the amino acid sequence of SEQ ID NO: 11, or an amino acid sequence which differs by no more than 1, 2, 5, 10, or 15 amino acid residues from the amino acid sequence of SEQ ID NO: 11.

[0083] 43. The multifunctional molecule of any of embodiments 1-4, wherein the antigen binding domain specifically binds to TCRβ V12 (e.g., TCRβ V12-3*01).

[0084] 44. The multifunctional molecule of embodiment 43, wherein the antigen binding domain comprises at least one (e.g., one, two, three, or four) variable region or an antigen-binding fragment thereof, as described in Table 2A, or encoded by the nucleotide sequence in Table 2A, or a sequence substantially identical (e.g., at least 80%, 85%, 90%, 92%, 95%, 97%, 98%, 99% or higher identical) to any of the aforesaid sequences.

[0085] 45. The multifunctional molecule of either of embodiments 43 or 44, wherein the antigen binding domain comprises at least one, two, or three CDRs (or collectively all of the CDRs) from a heavy chain variable region comprising an amino acid sequence shown in Table 2A, or encoded by a nucleotide sequence shown in Table 2A (or a sequence with one, two, three, four, five, six or more changes, e.g., amino acid substitutions or deletions, relative to the amino acid sequence shown in Table 2A, or encoded by a nucleotide sequence shown in Table 2A).

[0086] 46. The multifunctional molecule of any of embodiments 43-45, wherein the antigen binding domain comprises at least one, two, or three CDRs (or collectively all of the CDRs) from a light chain variable region comprising an amino acid sequence shown in Table 2A, or encoded by a nucleotide sequence shown in Table 2A (or a sequence with one, two, three, four, five, six or more changes, e.g., amino acid substitutions or deletions, relative to the amino acid sequence shown in Table 2A, or encoded by a nucleotide sequence shown in Table 2A).

[0087] 47. The multifunctional molecule of any of embodiments 43-46, wherein the antigen binding domain comprises:

(i) one, two or all of a light chain complementarity determining region 1 (LC CDR1), a light chain complementarity determining region 2 (LC CDR2), and a light chain complementarity determining region 3 (LC CDR3) of SEQ ID NO: 16, SEQ ID NO: 26, SEQ ID NO: 27, SEQ ID NO: 28, SEQ ID NO: 29, or SEQ ID NO: 30, and/or
(ii) one, two or all of a heavy chain complementarity determining region 1 (HC CDR1), heavy chain complementarity determining region 2 (HC CDR2), and a heavy chain complementarity determining region 3 (HC CDR3) of SEQ ID NO: 15, SEQ ID NO: 23, SEQ ID NO: 24, or SEQ ID NO: 25.

[0088] 48. The multifunctional molecule of any of embodiments 43-47, wherein the antigen binding domain comprises:

(i) a LC CDR1 amino acid sequence of SEQ ID NO: 20, a LC CDR2 amino acid sequence of SEQ ID NO: 21, or a LC CDR3 amino acid sequence of SEQ ID NO: 22; and/or
(ii) a HC CDR1 amino acid sequence of SEQ ID NO: 17, a HC CDR2 amino acid sequence of SEQ ID NO: 18, or a HC CDR3 amino acid sequence of SEQ ID NO: 19.

[0089] 49. The multifunctional molecule of any of embodiments 43-47, wherein the antigen binding domain comprises:

(i) a light chain variable region (VL) comprising a LC CDR1 amino acid sequence of SEQ ID NO: 20, a LC CDR2 amino acid sequence of SEQ ID NO: 21, and a LC CDR3 amino acid sequence of SEQ ID NO: 2; and/or
(ii) a heavy chain variable region (VH) comprising a HC CDR1 amino acid sequence of SEQ ID NO: 17, a HC CDR2 amino acid sequence of SEQ ID NO: 18, and a HC CDR3 amino acid sequence of SEQ ID NO: 19.

[0090] 50. The multifunctional molecule of any of embodiments 43-47, wherein the antigen binding domain comprises:

(i) a LC CDR1 amino acid sequence of SEQ ID NO: 63, a LC CDR2 amino acid sequence of SEQ ID NO: 64, or a LC CDR3 amino acid sequence of SEQ ID NO: 65; and/or
(ii) a HC CDR1 amino acid sequence of SEQ ID NO: 57, a HC CDR2 amino acid sequence of SEQ ID NO: 58, or a HC CDR3 amino acid sequence of SEQ ID NO: 59.

[0091] 51. The multifunctional molecule of any of embodiments 43-47, wherein the antigen binding domain comprises:

(i) a light chain variable region (VL) comprising a LC CDR1 amino acid sequence of SEQ ID NO: 63, a LC CDR2 amino acid sequence of SEQ ID NO: 64, or a LC CDR3 amino acid sequence of SEQ ID NO: 65; and/or
(ii) a heavy chain variable region (VH) comprising a HC CDR1 amino acid sequence of SEQ ID NO: 57, a HC CDR2 amino acid sequence of SEQ ID NO: 58, or a HC CDR3 amino acid sequence of SEQ ID NO: 59.

[0092] 52. The multifunctional molecule of any of embodiments 43-47, wherein the antigen binding domain comprises:

(i) a LC CDR1 amino acid sequence of SEQ ID NO: 66, a LC CDR2 amino acid sequence of SEQ ID NO: 67, or a LC CDR3 amino acid sequence of SEQ ID NO: 68; and/or
(ii) a HC CDR1 amino acid sequence of SEQ ID NO: 60, a HC CDR2 amino acid sequence of SEQ ID NO: 61, or a HC CDR3 amino acid sequence of SEQ ID NO: 62.

[0093] 53. The multifunctional molecule of any of embodiments 43-47, wherein the antigen binding domain comprises:

(i) a light chain variable region (VL) comprising a LC CDR1 amino acid sequence of SEQ ID NO: 63, a LC CDR2 amino acid sequence of SEQ ID NO: 64, or a LC CDR3 amino acid sequence of SEQ ID NO: 65; and/or
(ii) a heavy chain variable region (VH) comprising a HC CDR1 amino acid sequence of SEQ ID NO: 57, a HC CDR2 amino acid sequence of SEQ ID NO: 58, or a HC CDR3 amino acid sequence of SEQ ID NO: 59.

[0094] 54. The multifunctional molecule of any of embodiments 43-53, wherein the antigen binding domain comprises a light chain variable region (VL) comprising a light chain framework region 1 (VLFWR1) e.g., as shown in FIG. 2B, e.g., of SEQ ID NOs: 16 or 26-30.

[0095] 55. The multifunctional molecule of any of embodiments 43-54, wherein the antigen binding domain comprises a light chain variable region (VL) comprising a light chain framework region 2 (VLFWR2) e.g., as shown in FIG. 2B, e.g., of SEQ ID NOs: 16 or 26-30.

[0096] 56. The multifunctional molecule of any of embodiments 43-55, wherein the antigen binding domain comprises a light chain variable region (VL) comprising a light chain framework region 3 (VLFWR3) e.g., as shown in FIG. 2B, e.g., of SEQ ID NOs: 16 or 26-30.

[0097] 57. The multifunctional molecule of any of embodiments 43-56, wherein the antigen binding domain comprises a light chain variable region (VL) comprising a light chain framework region 4 (VLFWR4) e.g., as shown in FIG. 2B, e.g., of SEQ ID NOs: 16 or 26-30.

[0098] 58. The multifunctional molecule of any of embodiments 43-57, wherein the antigen binding domain comprises a light chain variable region (VL) comprising a light chain framework region 1 (VLFWR1), a light chain framework region 2 (VLFWR2), a light chain framework region 3 (VLFWR3), and a light chain framework region 4 (VLFWR4) of SEQ ID NO: 16.

[0099] 59. The multifunctional molecule of any of embodiments 43-57, wherein the antigen binding domain comprises a light chain variable region (VL) comprising a light chain framework region 1 (VLFWR1), a light chain framework region 2 (VLFWR2), a light chain framework region 3 (VLFWR3), and a light chain framework region 4 (VLFWR4) of SEQ ID NO: 26.

[0100] 60. The multifunctional molecule of any of embodiments 43-57, wherein the antigen binding domain comprises a light chain variable region (VL) comprising a light chain framework region 1 (VLFWR1), a light chain framework region 2 (VLFWR2), a light chain framework region 3 (VLFWR3), and a light chain framework region 4 (VLFWR4) of SEQ ID NO: 27.

[0101] 61. The multifunctional molecule of any of embodiments 43-57, wherein the antigen binding domain comprises a light chain variable region (VL) comprising a light chain framework region 1 (VLFWR1), a light chain framework region 2 (VLFWR2), a light chain framework region 3 (VLFWR3), and a light chain framework region 4 (VLFWR4) of SEQ ID NO: 28.

[0102] 62. The multifunctional molecule of any of embodiments 43-57, wherein the antigen binding domain comprises a light chain variable region (VL) comprising a light chain framework region 1 (VLFWR1), a light chain framework region 2 (VLFWR2), a light chain framework region 3 (VLFWR3), and a light chain framework region 4 (VLFWR4) of SEQ ID NO: 29.

[0103] 63. The multifunctional molecule of any of embodiments 43-57, wherein the antigen binding domain comprises a light chain variable region (VL) comprising a light chain framework region 1 (VLFWR1), a light chain framework region 2 (VLFWR2), a light chain framework region 3 (VLFWR3), and a light chain framework region 4 (VLFWR4) of SEQ ID NO: 30.

[0104] 64. The multifunctional molecule of any of embodiments 43-57, wherein the antigen binding domain comprises a light chain variable domain comprising a framework region, e.g., framework region 1 (VLFWR1), comprising one or more (e.g., one, two, or three) changes, e.g., substitutions (e.g., a conservative substitution), at positions selected from 1, 2, and 4 according to Kabat numbering, wherein the change at position 1 is to Aspartic Acid, e.g., a Alanine to Aspartic Acid substitution, the change at position 2 is to Asparagine, e.g., an Isoleucine to Asparagine substitution, and the change at position 4 is to Leucine, e.g., a Methionine to Leucine substitution.

[0105] 65. The multifunctional molecule of any of embodiments 43-57 or 64, wherein the antigen binding domain comprises a light chain variable domain comprising a framework region, e.g., framework region 3 (VLFWR3), comprising one or more (e.g., one, two, or three) changes, e.g., substitutions (e.g., a conservative substitution), at positions selected from 66, 69, and 71 according to Kabat numbering, wherein the change at position 66 is to Glycine, e.g., a Lysine to Glycine substitution, the change at position 69 is to Asparagine, e.g., an Tyrosine to Asparagine substitution, and the change at position 71 is to Tyrosine, e.g., a Phenylalanine to Tyrosine substitution.

[0106] 66. The multifunctional molecule of any of embodiments 43-57, 64, or 65, wherein the antigen binding domain comprises a light chain comprising a framework region 1 (FR1) comprising a substitution at position 2 according to Kabat numbering, e.g., a Isoleucine to Asparagine substitution; and a framework region 3 (FR3), comprising a substitution at position 69 according to Kabat numbering, e.g., a Threonine to Asparagine substitution and a substitution at position 71 according to Kabat numbering, e.g., a Phenylalanine to Tyrosine substitution, e.g., as shown in the amino acid sequence of SEQ ID NO: 26.

[0107] 67. The multifunctional molecule of any of embodiments 43-57, 64, or 65, wherein the antigen binding domain comprises a light chain comprising (a) a framework region 1 (FR1) comprising a substitution at position 1 according to Kabat numbering, e.g., a Alanine to Aspartic Acid substitution, and a substitution at position 2 according to Kabat numbering, e.g., a Isoleucine to Asparagine substitution; and (b) a framework region 3 (FR3), comprising a substitution at position 69 according to Kabat numbering, e.g., a Threonine to Asparagine substitution and a substitution at position 71 according to Kabat numbering, e.g., a Phenylalanine to Tyrosine substitution, e.g., as shown in the amino acid sequence of SEQ ID NO: 27.

[0108] 68. The multifunctional molecule of any of embodiments 43-57, 64, or 65, wherein the antigen binding domain comprises a light chain comprising (a) a framework region 1 (FR1) comprising a substitution at position 2 according to Kabat numbering, e.g., a Serine to Asparagine substitution; and a substitution at position 4 according to Kabat numbering, e.g., a Methionine to Leucine substitution; and (b) a framework region 3 (FR3), comprising a substitution at position 69 according to Kabat numbering, e.g., a Threonine to Asparagine substitution and a substitution at position 71 according to Kabat numbering, e.g., a Phenylalanine to Tyrosine substitution, e.g., as shown in the amino acid sequence of SEQ ID NO: 28.

[0109] 69. The multifunctional molecule of any of embodiments 43-57, 64, or 65, wherein the antigen binding domain comprises a light chain comprising (a) a framework region 1 (FR1) comprising a substitution at position 2 according to Kabat numbering, e.g., a Serine to Asparagine substitution; and (b) a framework region 3 (FR3) comprising a substitution at position 66 according to Kabat numbering, e.g., a Lysine to Glycine substitution; a substitution at position 69 according to Kabat numbering, e.g., a Threonine to Asparagine substitution; and a substitution at position 71 according to Kabat numbering, e.g., a Alanine to Tyrosine substitution, e.g., as shown in the amino acid sequence of SEQ ID NO: 29.

[0110] 70. The multifunctional molecule of any of embodiments 43-69, wherein the antigen binding domain comprises a heavy chain variable region (VH) comprising a heavy chain framework region 1 (VHFWR1) e.g., as shown in FIG. 2A, e.g., of SEQ ID NOs: 15 or 23-25.

[0111] 71. The multifunctional molecule of any of embodiments 43-70, wherein the antigen binding domain comprises a heavy chain variable region (VH) comprising a heavy chain framework region 2 (VHFWR2) e.g., as shown in FIG. 2A, e.g., of SEQ ID NOs: 15 or 23-25.

[0112] 72. The multifunctional molecule of any of embodiments 43-71, wherein the antigen binding domain comprises a heavy chain variable region (VH) comprising a heavy chain framework region 3 (VHFWR3) e.g., as shown in FIG. 2A, e.g., of SEQ ID NOs: 15 or 23-25.

[0113] 73. The multifunctional molecule of any of embodiments 43-72, wherein the antigen binding domain comprises a heavy chain variable region (VH) comprising a heavy chain framework region 4 (VHFWR4) e.g., as shown in FIG. 2A, e.g., of SEQ ID NOs: 15 or 23-25.

[0114] 74. The multifunctional molecule of any of embodiments 43-73, wherein the antigen binding domain comprises a heavy chain variable region (VH) comprising a heavy chain framework region 1 (VHFWR1), a heavy chain framework region 2 (VHFWR2), a heavy chain framework region 3 (VHFWR3), and a heavy chain framework region 4 (VHFWR4) of SEQ ID NO: 23.

[0115] 75. The multifunctional molecule of any of embodiments 43-73, wherein the antigen binding domain comprises a heavy chain variable region (VH) comprising a heavy chain framework region 1 (VHFWR1), a heavy chain framework region 2 (VHFWR2), a heavy chain framework region 3 (VHFWR3), and a heavy chain framework region 4 (VHFWR4) of SEQ ID NO: 24.

[0116] 76. The multifunctional molecule of any of embodiments 43-73, wherein the antigen binding domain comprises a heavy chain variable region (VH) comprising a heavy chain framework region 1 (VHFWR1), a heavy chain framework region 2 (VHFWR2), a heavy chain framework region 3 (VHFWR3), and a heavy chain framework region 4 (VHFWR4) of SEQ ID NO: 25.

[0117] 77. The multifunctional molecule of any of embodiments 43-73, wherein the antigen binding domain comprises a heavy chain comprising the heavy chain framework regions 1-4 of SEQ ID NOs: 23, 24, or 25; and a light chain comprising the light chain framework regions 1-4 of SEQ ID NOs: 26, 27, 28, 29, or 30.

[0118] 78. The multifunctional molecule of any of embodiments 43-73, wherein the antigen binding domain comprises:

a VH domain comprising an amino acid sequence chosen from the amino acid sequence of SEQ ID NO: 23, SEQ ID NO:24, or SEQ ID NO: 25, an amino acid sequence at least about 85%, 90%, 95%, 99% or more identical to the amino acid sequence SEQ ID NO: 23, SEQ ID NO:24, or SEQ ID NO:25, or an amino acid sequence which differs by no more than 1, 2, 5, 10, or 15 amino acid residues from the amino acid sequence of SEQ ID NO: 23, SEQ ID NO:24, or SEQ ID NO:25; and/or
a VL domain comprising an amino acid sequence chosen from the amino acid sequence of SEQ ID NO: 26, SEQ ID NO: 27, SEQ ID NO: 28, SEQ ID NO: 29, or SEQ ID NO: 30, an amino acid sequence at least about 85%, 90%, 95%, 99% or more identical to the amino acid sequence of SEQ ID NO: 26, SEQ ID NO: 27, SEQ ID NO: 28, SEQ ID NO: 29, or SEQ ID NO: 30, or an amino acid sequence which differs by no more than 1, 2, 5, 10, or 15 amino acid residues from the amino acid sequence of SEQ ID NO: 26, SEQ ID NO: 27, SEQ ID NO: 28, SEQ ID NO: 29, or SEQ ID NO: 30.

[0119] 79. The multifunctional molecule of any of embodiments 43-73, wherein the antigen binding domain comprises:

a VH domain comprising the amino acid sequence of SEQ ID NO: 23, an amino acid sequence at least about 85%, 90%, 95%, 99% or more identical to the amino acid sequence SEQ ID NO: 23, or an amino acid sequence which differs by no more than 1, 2, 5, 10, or 15 amino acid residues from the amino acid sequence of SEQ ID NO: 23; and
a VL domain comprising the amino acid sequence of SEQ ID NO: 26, an amino acid sequence at least about 85%, 90%, 95%, 99% or more identical to the amino acid sequence SEQ ID NO: 26, or an amino acid sequence which differs by no more than 1, 2, 5, 10, or 15 amino acid residues from the amino acid sequence of SEQ ID NO: 26.

[0120] 80. The multifunctional molecule of any of embodiments 43-73, wherein the antigen binding domain comprises:

a VH domain comprising the amino acid sequence of SEQ ID NO: 23, an amino acid sequence at least about 85%, 90%, 95%, 99% or more identical to the amino acid sequence SEQ ID NO: 23, or an amino acid sequence which differs by no more than 1, 2, 5, 10, or 15 amino acid residues from the amino acid sequence of SEQ ID NO: 23; and
a VL domain comprising the amino acid sequence of SEQ ID NO: 27, an amino acid sequence at least about 85%, 90%, 95%, 99% or more identical to the amino acid sequence SEQ ID NO: 27, or an amino acid sequence which differs by no more than 1, 2, 5, 10, or 15 amino acid residues from the amino acid sequence of SEQ ID NO: 27.

[0121] 81. The multifunctional molecule of any of embodiments 43-73, wherein the antigen binding domain comprises:

a VH domain comprising the amino acid sequence of SEQ ID NO: 23, an amino acid sequence at least about 85%, 90%, 95%, 99% or more identical to the amino acid sequence SEQ ID NO: 23, or an amino acid sequence which differs by no more than 1, 2, 5, 10, or 15 amino acid residues from the amino acid sequence of SEQ ID NO: 23; and
a VL domain comprising the amino acid sequence of SEQ ID NO: 28, an amino acid sequence at least about 85%, 90%, 95%, 99% or more identical to the amino acid sequence SEQ ID NO: 28, or an amino acid sequence which differs by no more than 1, 2, 5, 10, or 15 amino acid residues from the amino acid sequence of SEQ ID NO: 28.

[0122] 82. The multifunctional molecule of any of embodiments 43-73, wherein the antigen binding domain comprises:

a VH domain comprising the amino acid sequence of SEQ ID NO: 23, an amino acid sequence at least about 85%, 90%, 95%, 99% or more identical to the amino acid sequence SEQ ID NO: 23, or an amino acid sequence which differs by no more than 1, 2, 5, 10, or 15 amino acid residues from the amino acid sequence of SEQ ID NO: 23; and
a VL domain comprising the amino acid sequence of SEQ ID NO: 29, an amino acid sequence at least about 85%, 90%, 95%, 99% or more identical to the amino acid sequence SEQ ID NO: 29, or an amino acid sequence which differs by no more than 1, 2, 5, 10, or 15 amino acid residues from the amino acid sequence of SEQ ID NO: 29.

[0123] 83. The multifunctional molecule of any of embodiments 43-73, wherein the antigen binding domain comprises:

a VH domain comprising the amino acid sequence of SEQ ID NO: 23, an amino acid sequence at least about 85%, 90%, 95%, 99% or more identical to the amino acid sequence SEQ ID NO: 23, or an amino acid sequence which differs by no more than 1, 2, 5, 10, or 15 amino acid residues from the amino acid sequence of SEQ ID NO: 23; and
a VL domain comprising the amino acid sequence of SEQ ID NO: 30, an amino acid sequence at least about 85%, 90%, 95%, 99% or more identical to the amino acid sequence SEQ ID NO: 30, or an amino acid sequence which differs by no more than 1, 2, 5, 10, or 15 amino acid residues from the amino acid sequence of SEQ ID NO: 30.

[0124] 84. The multifunctional molecule of any of embodiments 43-73, wherein the antigen binding domain comprises:

a VH domain comprising the amino acid sequence of SEQ ID NO: 24, an amino acid sequence at least about 85%, 90%, 95%, 99% or more identical to the amino acid sequence SEQ ID NO: 24, or an amino acid sequence which differs by no more than 1, 2, 5, 10, or 15 amino acid residues from the amino acid sequence of SEQ ID NO: 24; and
a VL domain comprising the amino acid sequence of SEQ ID NO: 26, an amino acid sequence at least about 85%, 90%, 95%, 99% or more identical to the amino acid sequence SEQ ID NO: 26, or an amino acid sequence which differs by no more than 1, 2, 5, 10, or 15 amino acid residues from the amino acid sequence of SEQ ID NO: 26.

[0125] 85. The multifunctional molecule of any of embodiments 43-73, wherein the antigen binding domain comprises:

a VH domain comprising the amino acid sequence of SEQ ID NO: 24, an amino acid sequence at least about 85%, 90%, 95%, 99% or more identical to the amino acid sequence SEQ ID NO: 24, or an amino acid sequence which differs by no more than 1, 2, 5, 10, or 15 amino acid residues from the amino acid sequence of SEQ ID NO: 24; and
a VL domain comprising the amino acid sequence of SEQ ID NO: 27, an amino acid sequence at least about 85%, 90%, 95%, 99% or more identical to the amino acid sequence SEQ ID NO: 27, or an amino acid sequence which differs by no more than 1, 2, 5, 10, or 15 amino acid residues from the amino acid sequence of SEQ ID NO: 27.

[0126] 86. The multifunctional molecule of any of embodiments 43-73, wherein the antigen binding domain comprises:

a VH domain comprising the amino acid sequence of SEQ ID NO: 24, an amino acid sequence at least about 85%, 90%, 95%, 99% or more identical to the amino acid sequence SEQ ID NO: 24, or an amino acid sequence which differs by no more than 1, 2, 5, 10, or 15 amino acid residues from the amino acid sequence of SEQ ID NO: 24; and
a VL domain comprising the amino acid sequence of SEQ ID NO: 28, an amino acid sequence at least about 85%, 90%, 95%, 99% or more identical to the amino acid sequence SEQ ID NO: 28, or an amino acid sequence which differs by no more than 1, 2, 5, 10, or 15 amino acid residues from the amino acid sequence of SEQ ID NO: 28.

[0127] 87. The multifunctional molecule of any of embodiments 43-73, wherein the antigen binding domain comprises:

a VH domain comprising the amino acid sequence of SEQ ID NO: 24, an amino acid sequence at least about 85%, 90%, 95%, 99% or more identical to the amino acid sequence SEQ ID NO: 24, or an amino acid sequence which differs by no more than 1, 2, 5, 10, or 15 amino acid residues from the amino acid sequence of SEQ ID NO: 24; and
a VL domain comprising the amino acid sequence of SEQ ID NO: 29, an amino acid sequence at least about 85%, 90%, 95%, 99% or more identical to the amino acid sequence SEQ ID NO: 29, or an amino acid sequence which differs by no more than 1, 2, 5, 10, or 15 amino acid residues from the amino acid sequence of SEQ ID NO: 29.

[0128] 88. The multifunctional molecule of any of embodiments 43-73, wherein the antigen binding domain comprises:

a VH domain comprising the amino acid sequence of SEQ ID NO: 24, an amino acid sequence at least about 85%, 90%, 95%, 99% or more identical to the amino acid sequence SEQ ID NO: 24, or an amino acid sequence which differs by no more than 1, 2, 5, 10, or 15 amino acid residues from the amino acid sequence of SEQ ID NO: 24; and
a VL domain comprising the amino acid sequence of SEQ ID NO: 30, an amino acid sequence at least about 85%, 90%, 95%, 99% or more identical to the amino acid sequence SEQ ID NO: 30, or an amino acid sequence which differs by no more than 1, 2, 5, 10, or 15 amino acid residues from the amino acid sequence of SEQ ID NO: 30.

[0129] 89. The multifunctional molecule of any of embodiments 43-73, wherein the antigen binding domain comprises:

a VH domain comprising the amino acid sequence of SEQ ID NO: 25, an amino acid sequence at least about 85%, 90%, 95%, 99% or more identical to the amino acid sequence SEQ ID NO: 25, or an amino acid sequence which differs by no more than 1, 2, 5, 10, or 15 amino acid residues from the amino acid sequence of SEQ ID NO: 25; and
a VL domain comprising the amino acid sequence of SEQ ID NO: 26, an amino acid sequence at least about 85%, 90%, 95%, 99% or more identical to the amino acid sequence SEQ ID NO: 26, or an amino acid sequence which differs by no more than 1, 2, 5, 10, or 15 amino acid residues from the amino acid sequence of SEQ ID NO: 26.

[0130] 90. The multifunctional molecule of any of embodiments 43-73, wherein the antigen binding domain comprises:

a VH domain comprising the amino acid sequence of SEQ ID NO: 25, an amino acid sequence at least about 85%, 90%, 95%, 99% or more identical to the amino acid sequence SEQ ID NO: 25, or an amino acid sequence which differs by no more than 1, 2, 5, 10, or 15 amino acid residues from the amino acid sequence of SEQ ID NO: 25; and
a VL domain comprising the amino acid sequence of SEQ ID NO: 27, an amino acid sequence at least about 85%, 90%, 95%, 99% or more identical to the amino acid sequence SEQ ID NO: 27, or an amino acid sequence which differs by no more than 1, 2, 5, 10, or 15 amino acid residues from the amino acid sequence of SEQ ID NO: 27.

[0131] 91. The multifunctional molecule of any of embodiments 43-73, wherein the antigen binding domain comprises:

a VH domain comprising the amino acid sequence of SEQ ID NO: 25, an amino acid sequence at least about 85%, 90%, 95%, 99% or more identical to the amino acid sequence SEQ ID NO: 25, or an amino acid sequence which differs by no more than 1, 2, 5, 10, or 15 amino acid residues from the amino acid sequence of SEQ ID NO: 25; and
a VL domain comprising the amino acid sequence of SEQ ID NO: 28, an amino acid sequence at least about 85%, 90%, 95%, 99% or more identical to the amino acid sequence SEQ ID NO: 28, or an amino acid sequence which differs by no more than 1, 2, 5, 10, or 15 amino acid residues from the amino acid sequence of SEQ ID NO: 28.

[0132] 92. The multifunctional molecule of any of embodiments 43-73, wherein the antigen binding domain comprises:

a VH domain comprising the amino acid sequence of SEQ ID NO: 25, an amino acid sequence at least about 85%, 90%, 95%, 99% or more identical to the amino acid sequence SEQ ID NO: 25, or an amino acid sequence which differs by no more than 1, 2, 5, 10, or 15 amino acid residues from the amino acid sequence of SEQ ID NO: 25; and
a VL domain comprising the amino acid sequence of SEQ ID NO: 29, an amino acid sequence at least about 85%, 90%, 95%, 99% or more identical to the amino acid sequence SEQ ID NO: 29, or an amino acid sequence which differs by no more than 1, 2, 5, 10, or 15 amino acid residues from the amino acid sequence of SEQ ID NO: 29.

[0133] 93. The multifunctional molecule of any of embodiments 43-73, wherein the antigen binding domain comprises:

a VH domain comprising the amino acid sequence of SEQ ID NO: 25, an amino acid sequence at least about 85%, 90%, 95%, 99% or more identical to the amino acid sequence SEQ ID NO: 25, or an amino acid sequence which differs by no more than 1, 2, 5, 10, or 15 amino acid residues from the amino acid sequence of SEQ ID NO: 25; and
a VL domain comprising the amino acid sequence of SEQ ID NO: 30, an amino acid sequence at least about 85%, 90%, 95%, 99% or more identical to the amino acid sequence SEQ ID NO: 30, or an amino acid sequence which differs by no more than 1, 2, 5, 10, or 15 amino acid residues from the amino acid sequence of SEQ ID NO: 30.

[0134] 94. The multifunctional molecule of any one of embodiments 1-93, wherein the first antigen binding domain has a higher affinity for a T cell receptor comprising the TCRBV antigen, optionally wherein the K_{D} for the binding between the first antigen binding domain and the T cell receptor comprising the TCRBV antigen is no more than 40%, 30%, 20%, 10%, 1%, 0.1%, or 0.01% of the K_{D} for the binding between the first antigen binding domain and a T cell receptor not comprising the TCRBV antigen.

[0135] 95. The multifunctional molecule of any preceding embodiment, wherein binding of the first antigen binding domain to the TCRBV antigen, e.g., on a lymphocyte (e.g., T cell), does not activate the lymphocyte, e.g., T cell.

[0136] 96. The multifunctional molecule of any preceding embodiment, wherein binding of the first antigen binding domain to the TCRBV antigen, e.g., on a lymphocyte (e.g., T cell), does not appreciably activate lymphocyte, e.g., T cell, (e.g., as measured by T cell proliferation, expression of a T cell activation marker (e.g., CD69 or CD25), and/or expression of a cytokine (e.g., TNFα and IFNγ).

[0137] 97. The multifunctional molecule of any preceding embodiment, wherein the multifunctional molecule preferentially binds to a lymphocyte comprising the TCRBV antigen over a lymphocyte not comprising the TCRBV antigen, optionally wherein the binding between the multifunctional molecule and the lymphocyte comprising the TCRBV antigen is more than 10, 20, 30, 40, or 50-fold greater than the binding between the multifunctional molecule and a lymphocyte not comprising the TCRBV antigen.

[0138] 98. The multifunctional molecule of any one of embodiments 1-97, wherein the multifunctional molecule comprises an immune cell engager chosen from an NK cell engager, a T cell engager, a B cell engager, a dendritic cell engager, or a macrophage cell engager.

[0139] 99. The multifunctional molecule of embodiment 98, wherein the immune cell engager binds to and activates an immune cell, e.g., an effector cell.

[0140] 100. The multifunctional molecule of embodiment 98, wherein the immune cell engager binds to, but does not activate, an immune cell, e.g., an effector cell.

[0141] 101. The multifunctional molecule of any one of embodiments 98-100, wherein the immune cell engager is a T cell engager, e.g., a T cell engager that mediates binding to and activation of a T cell, or a T cell engager that mediates binding to but not activation of a T cell.

[0142] 102. The multifunctional molecule of embodiment 101, wherein the T cell engager binds to TCRα, TCRγ, TCRζ, ICOS, CD28, CD27, HVEM, LIGHT, CD40, 4-1BB, OX40, DR3, GITR, CD30, TIMI, SLAM, CD2, CD3, or CD226, e.g., the T cell engager is an anti-CD3 antibody molecule.

[0143] 103. The multifunctional molecule of any one of embodiments 98-100, wherein the immune cell engager is an NK cell engager, e.g., an NK cell engager that mediates binding to and activation of an NK cell, or an NK cell engager that mediates binding to but not activation of an NK cell.

[0144] 104. The multifunctional molecule of embodiment 103, wherein the NK cell engager is chosen from an antibody molecule, e.g., an antigen binding domain, or ligand that binds to (e.g., activates): NKp30, NKp40, NKp44, NKp46, NKG2D, DNAM1, DAP10, CD16 (e.g., CD16a, CD16b, or both), CRTAM, CD27, PSGL1, CD96, CD100 (SEMA4D), NKp80, CD244 (also known as SLAMF4 or 2B4), SLAMF6, SLAMF7, KIR2DS2, KIR2DS4, KIR3DS1, KIR2DS3, KIR2DS5, KIR2DS1, CD94, NKG2C, NKG2E, or CD160, e.g., the NK cell engager is an antibody molecule or ligand that binds to (e.g., activates) NKp30.

[0145] 105. The multifunctional molecule of embodiment 103, wherein the NK cell engager is an antibody molecule, e.g., an antigen binding domain.

[0146] 106. The multifunctional molecule of either of embodiments 104 or 105, wherein the NK cell engager is capable of engaging an NK cell.

[0147] 107. The multifunctional molecule of any one of embodiments 103-106, wherein the NK cell engager is an antibody molecule, e.g., an antigen binding domain, that binds to NKp30, NKp46, NKG2D, or CD16.

[0148] 108. The multifunctional molecule of any preceding embodiment, wherein the multifunctional molecule:

(i) binds specifically to an epitope of NKp30, NKp46, NKG2D, or CD16, e.g., the same or similar epitope as the epitope recognized by an anti-NKp30, anti-NKp46, anti-NKG2D, or anti-CD16 antibody molecule as described herein;
(ii) shows the same or similar binding affinity or specificity, or both, as an anti-NKp30, anti-NKp46, anti-NKG2D, or anti-CD16 antibody molecule as described herein;
(iii) inhibits, e.g., competitively inhibits, the binding of an anti-NKp30, anti-NKp46, anti-NKG2D, or anti-CD16 antibody molecule as described herein;
(iv) binds the same or an overlapping epitope with an anti-NKp30, anti-NKp46, anti-NKG2D, or anti-CD16 antibody molecule as described herein; or
(v) competes for binding, and/or binds the same epitope, with an anti-NKp30, anti-NKp46, anti-NKG2D, or anti-CD16 antibody molecule as described herein.

[0149] 109. The multifunctional molecule of any of embodiments 103-108, wherein the anti-NKp30 or anti-NKp46 antibody molecule comprises one or more CDRs, framework regions, variable domains, heavy or light chains, or an antigen binding domain chosen from Tables 7-10, or a sequence substantially identical thereto.

[0150] 110. The multifunctional molecule of any of embodiments 103-109, wherein the NK cell engager is an antibody molecule, e.g., an antigen binding domain, that binds to NKp30.

[0151] 111. The multifunctional molecule of any of embodiments 103-110, wherein lysis of the lymphocyte, e.g., lymphocyte comprising a TCRBV antigen corresponding to a biased TCRBV clonotype, is mediated by NKp30.

[0152] 112. The multifunctional molecule of any of embodiments 103-111, wherein the multifunctional molecule does not activate the NK cell when incubated with the NK cell in the absence of the TCRBV antigen.

[0153] 113. The multifunctional molecule of any of embodiments 103-112, wherein the multifunctional molecule activates the NK cell when the NK cell is a NKp30 expressing NK cell and when the TCRBV antigen is also present.

[0154] 114. The multifunctional molecule of any of embodiments 103-113, wherein the multifunctional molecule does not activate the NK cell when the NK cell is not a NKp30 expressing NK cell and the TCRBV antigen is also present.

[0155] 115. The multifunctional molecule of any of embodiments 103-113, wherein the NK cell engager comprises:

(i) a heavy chain variable region (VH) comprising a heavy chain complementarity determining region 1 (VHCDR1) amino acid sequence of SEQ ID NO: 6000 (or a sequence with no more than 1, 2, 3, or 4 mutations, e.g., substitutions, additions, or deletions), a VHCDR2 amino acid sequence of SEQ ID NO: 6001 (or a sequence with no more than 1, 2, 3, or 4 mutations, e.g., substitutions, additions, or deletions), and/or a VHCDR3 amino acid sequence of SEQ ID NO: 6002 (or a sequence with no more than 1, 2, 3, or 4 mutations, e.g., substitutions, additions, or deletions), and
(ii) a light chain variable region (VL) comprising a light chain complementarity determining region 1 (VLCDR1) amino acid sequence of SEQ ID NO: 6063 (or a sequence with no more than 1, 2, 3, or 4 mutations, e.g., substitutions, additions, or deletions), a VLCDR2 amino acid sequence of SEQ ID NO: 6064 (or a sequence with no more than 1, 2, 3, or 4 mutations, e.g., substitutions, additions, or deletions), and/or a VLCDR3 amino acid sequence of SEQ ID NO: 6065 (or a sequence with no more than 1, 2, 3, or 4 mutations, e.g., substitutions, additions, or deletions).

[0156] 116. The multifunctional molecule of embodiment 115, wherein the NK cell engager comprises:

(i) a heavy chain variable region (VH) comprising a heavy chain complementarity determining region 1 (VHCDR1) amino acid sequence of SEQ ID NO: 6000, a VHCDR2 amino acid sequence of SEQ ID NO: 6001, and/or a VHCDR3 amino acid sequence of SEQ ID NO: 6002, and
(ii) a light chain variable region (VL) comprising a light chain complementarity determining region 1 (VLCDR1) amino acid sequence of SEQ ID NO: 6063, a VLCDR2 amino acid sequence of SEQ ID NO: 6064, and/or a VLCDR3 amino acid sequence of SEQ ID NO: 6065.

[0157] 117. The multifunctional molecule of any of embodiments 103-116, wherein the NK cell engager comprises:

(1) a heavy chain variable region (VH) comprising a heavy chain framework region 1 (VHFWR1) amino acid sequence of SEQ ID NO: 6003 (or a sequence with no more than 1, 2, 3, 4, 5, or 6 mutations, e.g., substitutions, additions, or deletions, therefrom), a VHFWR2 amino acid sequence of SEQ ID NO: 6004 (or a sequence with no more than 1, 2, 3, 4, 5, or 6 mutations, e.g., substitutions, additions, or deletions, therefrom), a VHFWR3 amino acid sequence of SEQ ID NO: 6005 (or a sequence with no more than 1, 2, 3, 4, 5, or 6 mutations, e.g., substitutions, additions, or deletions, therefrom), or a VHFWR4 amino acid sequence of SEQ ID NO: 6006 (or a sequence with no more than 1, 2, 3, 4, 5, or 6 mutations, e.g., substitutions, additions, or deletions, therefrom), and/or
(2) a light chain variable region (VL) comprising a light chain framework region 1 (VLFWR1) amino acid sequence of SEQ ID NO: 6066 (or a sequence with no more than 1, 2, 3, 4, 5, or 6 mutations, e.g., substitutions, additions, or deletions, therefrom), a VLFWR2 amino acid sequence of SEQ ID NO: 6067 (or a sequence with no more than 1, 2, 3, 4, 5, or 6 mutations, e.g., substitutions, additions, or deletions, therefrom), a VLFWR3 amino acid sequence of SEQ ID NO: 6068 (or a sequence with no more than 1, 2, 3, 4, 5, or 6 mutations, e.g., substitutions, additions, or deletions, therefrom), or a VLFWR4 amino acid sequence of SEQ ID NO: 6069 (or a sequence with no more than 1, 2, 3, 4, 5, or 6 mutations, e.g., substitutions, additions, or deletions, therefrom).

[0158] 118. The multifunctional molecule of embodiment 117, wherein the NK cell engager comprises:

(1) a heavy chain variable region (VH) comprising a heavy chain framework region 1 (VHFWR1) amino acid sequence of SEQ ID NO: 6003, a VHFWR2 amino acid sequence of SEQ ID NO: 6004, a VHFWR3 amino acid sequence of SEQ ID NO: 6005, or a VHFWR4 amino acid sequence of SEQ ID NO: 6006, and
(2) a light chain variable region (VL) comprising a light chain framework region 1 (VLFWR1) amino acid sequence of SEQ ID NO: 6066, a VLFWR2 amino acid sequence of SEQ ID NO: 6067, a VLFWR3 amino acid sequence of SEQ ID NO: 6068, or a VLFWR4 amino acid sequence of SEQ ID NO: 6069.

[0159] 119. The multifunctional molecule of any one of embodiments 103-118, wherein the NK cell engager comprises:

(i) a VH comprising the amino acid sequence of SEQ ID NO: 6121 (or an amino acid sequence having at least about 75%, 80%, 85%, 90%, 95%, or 99% sequence identity to SEQ ID NO: 6121), and/or
(ii) a VL comprising the amino acid sequence of SEQ ID NO: 6135 (or an amino acid sequence having at least about 93%, 95%, or 99% sequence identity to SEQ ID NO: 6135).

[0160] 120. The multifunctional molecule of either of embodiments 103-119, wherein the NK cell engager comprises a heavy chain comprising the amino acid sequence of SEQ ID NOs: 6148 or 6149 (or an amino acid sequence having at least about 75%, 80%, 85%, 90%, 95%, or 99% sequence identity to SEQ ID NOs: 6148 or 6149).

[0161] 121. The multifunctional molecule of either of embodiments 103-120, wherein the NK cell engager comprises a light chain comprising the amino acid sequence of SEQ ID NO: 6150 (or an amino acid sequence having at least about 75%, 80%, 85%, 90%, 95%, or 99% sequence identity to SEQ ID NO: 6150).

[0162] 122. The multifunctional molecule of either of embodiments 103-121, wherein the NK cell engager comprises a heavy chain comprising the amino acid sequence of SEQ ID NOs: 6148 or 6149 (or an amino acid sequence having at least about 75%, 80%, 85%, 90%, 95%, or 99% sequence identity to SEQ ID NOs: 6148 or 6149), and a light chain comprising the amino acid sequence of SEQ ID NO: 6150 (or an amino acid sequence having at least about 75%, 80%, 85%, 90%, 95%, or 99% sequence identity to SEQ ID NO: 6150).

[0163] 123. The multifunctional molecule of any of embodiments 103-116, wherein the NK cell engager comprises a heavy chain variable region (VH) comprising a heavy chain framework region 1 (VHFWR1) amino acid sequence of SEQ ID NO: 6014 (or a sequence with no more than 1, 2, 3, 4, 5, or 6 mutations, e.g., substitutions, additions, or deletions, therefrom), a VHFWR2 amino acid sequence of SEQ ID NO: 6015 (or a sequence with no more than 1, 2, 3, 4, 5, or 6 mutations, e.g., substitutions, additions, or deletions, therefrom), a VHFWR3 amino acid sequence of SEQ ID NO: 6016 (or a sequence with no more than 1, 2, 3, 4, 5, or 6 mutations, e.g., substitutions, additions, or deletions, therefrom), or a VHFWR4 amino acid sequence of SEQ ID NO: 6017 (or a sequence with no more than 1, 2, 3, 4, 5, or 6 mutations, e.g., substitutions, additions, or deletions, therefrom).

[0164] 124. The multifunctional molecule of embodiment 123, wherein the NK cell engager comprises a heavy chain variable region (VH) comprising a heavy chain framework region 1 (VHFWR1) amino acid sequence of SEQ ID NO: 6014, a VHFWR2 amino acid sequence of SEQ ID NO: 6015, a VHFWR3 amino acid sequence of SEQ ID NO: 6016, or a VHFWR4 amino acid sequence of SEQ ID NO: 6017.

[0165] 125. The multifunctional molecule of embodiment 124, wherein the NK cell engager comprises a VH comprising the amino acid sequence of SEQ ID NO: 6123 (or an amino acid sequence having at least about 75%, 80%, 85%, 90%, 95%, or 99% sequence identity to SEQ ID NO: 6123).

[0166] 126. The multifunctional molecule of any of embodiments 103-116, wherein the NK cell engager comprises a heavy chain variable region (VH) comprising a heavy chain framework region 1 (VHFWR1) amino acid sequence of SEQ ID NO: 6018 (or a sequence with no more than 1, 2, 3, 4, 5, or 6 mutations, e.g., substitutions, additions, or deletions, therefrom), a VHFWR2 amino acid sequence of SEQ ID NO: 6019 (or a sequence with no more than 1, 2, 3, 4, 5, or 6 mutations, e.g., substitutions, additions, or deletions, therefrom), a VHFWR3 amino acid sequence of SEQ ID NO: 6020 (or a sequence with no more than 1, 2, 3, 4, 5, or 6 mutations, e.g., substitutions, additions, or deletions, therefrom), or a VHFWR4 amino acid sequence of SEQ ID NO: 6021 (or a sequence with no more than 1, 2, 3, 4, 5, or 6 mutations, e.g., substitutions, additions, or deletions, therefrom).

[0167] 127. The multifunctional molecule of embodiment 126, wherein the NK cell engager comprises a heavy chain variable region (VH) comprising a heavy chain framework region 1 (VHFWR1) amino acid sequence of SEQ ID NO: 6018, a VHFWR2 amino acid sequence of SEQ ID NO: 6019, a VHFWR3 amino acid sequence of SEQ ID NO: 6020, or a VHFWR4 amino acid sequence of SEQ ID NO: 6021.

[0168] 128. The multifunctional molecule of embodiment 127, wherein the NK cell engager comprises a VH comprising the amino acid sequence of SEQ ID NO: 6124 (or an amino acid sequence having at least about 75%, 80%, 85%, 90%, 95%, or 99% sequence identity to SEQ ID NO: 6124).

[0169] 129. The multifunctional molecule of any of embodiments 103-116, wherein the NK cell engager comprises a heavy chain variable region (VH) comprising a heavy chain framework region 1 (VHFWR1) amino acid sequence of SEQ ID NO: 6022 (or a sequence with no more than 1, 2, 3, 4, 5, or 6 mutations, e.g., substitutions, additions, or deletions, therefrom), a VHFWR2 amino acid sequence of SEQ ID NO: 6023 (or a sequence with no more than 1, 2, 3, 4, 5, or 6 mutations, e.g., substitutions, additions, or deletions, therefrom), a VHFWR3 amino acid sequence of SEQ ID NO: 6024 (or a sequence with no more than 1, 2, 3, 4, 5, or 6 mutations, e.g., substitutions, additions, or deletions, therefrom), or a VHFWR4 amino acid sequence of SEQ ID NO: 6025 (or a sequence with no more than 1, 2, 3, 4, 5, or 6 mutations, e.g., substitutions, additions, or deletions, therefrom).

[0170] 130. The multifunctional molecule of embodiment 129, wherein the NK cell engager comprises a heavy chain variable region (VH) comprising a heavy chain framework region 1 (VHFWR1) amino acid sequence of SEQ ID NO: 6022, a VHFWR2 amino acid sequence of SEQ ID NO: 6023, a VHFWR3 amino acid sequence of SEQ ID NO: 6024, or a VHFWR4 amino acid sequence of SEQ ID NO: 6025.

[0171] 131. The multifunctional molecule of embodiment 130, wherein the NK cell engager comprises a VH comprising the amino acid sequence of SEQ ID NO: 6125 (or an amino acid sequence having at least about 75%, 80%, 85%, 90%, 95%, or 99% sequence identity to SEQ ID NO: 6125).

[0172] 132. The multifunctional molecule of any of embodiments 103-116, wherein the NK cell engager comprises a heavy chain variable region (VH) comprising a heavy chain framework region 1 (VHFWR1) amino acid sequence of SEQ ID NO: 6026 (or a sequence with no more than 1, 2, 3, 4, 5, or 6 mutations, e.g., substitutions, additions, or deletions, therefrom), a VHFWR2 amino acid sequence of SEQ ID NO: 6027 (or a sequence with no more than 1, 2, 3, 4, 5, or 6 mutations, e.g., substitutions, additions, or deletions, therefrom), a VHFWR3 amino acid sequence of SEQ ID NO: 6028 (or a sequence with no more than 1, 2, 3, 4, 5, or 6 mutations, e.g., substitutions, additions, or deletions, therefrom), or a VHFWR4 amino acid sequence of SEQ ID NO: 6029 (or a sequence with no more than 1, 2, 3, 4, 5, or 6 mutations, e.g., substitutions, additions, or deletions, therefrom).

[0173] 133. The multifunctional molecule of embodiment 132, wherein the NK cell engager comprises a heavy chain variable region (VH) comprising a heavy chain framework region 1 (VHFWR1) amino acid sequence of SEQ ID NO: 6026, a VHFWR2 amino acid sequence of SEQ ID NO: 6027, a VHFWR3 amino acid sequence of SEQ ID NO: 6028, or a VHFWR4 amino acid sequence of SEQ ID NO: 6029.

[0174] 134. The multifunctional molecule of embodiment 133, wherein the NK cell engager comprises a VH comprising the amino acid sequence of SEQ ID NO: 6126 (or an amino acid sequence having at least about 75%, 80%, 85%, 90%, 95%, or 99% sequence identity to SEQ ID NO: 6126).

[0175] 135. The multifunctional molecule of any of embodiments 103-116, wherein the NK cell engager comprises a heavy chain variable region (VH) comprising a heavy chain framework region 1 (VHFWR1) amino acid sequence of SEQ ID NO: 6030 (or a sequence with no more than 1, 2, 3, 4, 5, or 6 mutations, e.g., substitutions, additions, or deletions, therefrom), a VHFWR2 amino acid sequence of SEQ ID NO: 6032 (or a sequence with no more than 1, 2, 3, 4, 5, or 6 mutations, e.g., substitutions, additions, or deletions, therefrom), a VHFWR3 amino acid sequence of SEQ ID NO: 6033 (or a sequence with no more than 1, 2, 3, 4, 5, or 6 mutations, e.g., substitutions, additions, or deletions, therefrom), or a VHFWR4 amino acid sequence of SEQ ID NO: 6034 (or a sequence with no more than 1, 2, 3, 4, 5, or 6 mutations, e.g., substitutions, additions, or deletions, therefrom).

[0176] 136. The multifunctional molecule of embodiment 135, wherein the NK cell engager comprises a heavy chain variable region (VH) comprising a heavy chain framework region 1 (VHFWR1) amino acid sequence of SEQ ID NO: 6030, a VHFWR2 amino acid sequence of SEQ ID NO: 6032, a VHFWR3 amino acid sequence of SEQ ID NO: 6033, or a VHFWR4 amino acid sequence of SEQ ID NO: 6034.

[0177] 137. The multifunctional molecule of embodiment 136, wherein the NK cell engager comprises a VH comprising the amino acid sequence of SEQ ID NO: 6127 (or an amino acid sequence having at least about 75%, 80%, 85%, 90%, 95%, or 99% sequence identity to SEQ ID NO: 6127).

[0178] 138. The multifunctional molecule of any of embodiments 103-116, wherein the NK cell engager comprises a heavy chain variable region (VH) comprising a heavy chain framework region 1 (VHFWR1) amino acid sequence of SEQ ID NO: 6035 (or a sequence with no more than 1, 2, 3, 4, 5, or 6 mutations, e.g., substitutions, additions, or deletions, therefrom), a VHFWR2 amino acid sequence of SEQ ID NO: 6036 (or a sequence with no more than 1, 2, 3, 4, 5, or 6 mutations, e.g., substitutions, additions, or deletions, therefrom), a VHFWR3 amino acid sequence of SEQ ID NO: 6037 (or a sequence with no more than 1, 2, 3, 4, 5, or 6 mutations, e.g., substitutions, additions, or deletions, therefrom), or a VHFWR4 amino acid sequence of SEQ ID NO: 6038 (or a sequence with no more than 1, 2, 3, 4, 5, or 6 mutations, e.g., substitutions, additions, or deletions, therefrom).

[0179] 139. The multifunctional molecule of embodiment 138, wherein the NK cell engager comprises a heavy chain variable region (VH) comprising a heavy chain framework region 1 (VHFWR1) amino acid sequence of SEQ ID NO: 6035, a VHFWR2 amino acid sequence of SEQ ID NO: 6036, a VHFWR3 amino acid sequence of SEQ ID NO: 6037, or a VHFWR4 amino acid sequence of SEQ ID NO: 6038.

[0180] 140. The multifunctional molecule of embodiment 139, wherein the NK cell engager comprises a VH comprising the amino acid sequence of SEQ ID NO: 6128 (or an amino acid sequence having at least about 75%, 80%, 85%, 90%, 95%, or 99% sequence identity to SEQ ID NO: 6128).

[0181] 141. The multifunctional molecule of any of embodiments 103-116 or 123-140, wherein the NK cell engager comprises a light chain variable region (VL) comprising a light chain framework region 1 (VLFWR1) amino acid sequence of SEQ ID NO: 6077 (or a sequence with no more than 1, 2, 3, 4, 5, or 6 mutations, e.g., substitutions, additions, or deletions, therefrom), a VLFWR2 amino acid sequence of SEQ ID NO: 6078 (or a sequence with no more than 1, 2, 3, 4, 5, or 6 mutations, e.g., substitutions, additions, or deletions, therefrom), a VLFWR3 amino acid sequence of SEQ ID NO: 6079 (or a sequence with no more than 1, 2, 3, 4, 5, or 6 mutations, e.g., substitutions, additions, or deletions, therefrom), or a VLFWR4 amino acid sequence of SEQ ID NO: 6080 (or a sequence with no more than 1, 2, 3, 4, 5, or 6 mutations, e.g., substitutions, additions, or deletions, therefrom).

[0182] 142. The multifunctional molecule of embodiment 141, wherein the NK cell engager comprises a light chain variable region (VL) comprising a light chain framework region 1 (VLFWR1) amino acid sequence of SEQ ID NO: 6077, a VLFWR2 amino acid sequence of SEQ ID NO: 6078, a VLFWR3 amino acid sequence of SEQ ID NO: 6079, or a VLFWR4 amino acid sequence of SEQ ID NO: 6080.

[0183] 143. The multifunctional molecule of embodiment 142, wherein the NK cell engager comprises a VL comprising the amino acid sequence of SEQ ID NO: 6137 (or an amino acid sequence having at least about 93%, 95%, or 99% sequence identity to SEQ ID NO: 6137).

[0184] 144. The multifunctional molecule of any of embodiments 103-116 or 123-140, wherein the NK cell engager comprises a light chain variable region (VL) comprising a light chain framework region 1 (VLFWR1) amino acid sequence of SEQ ID NO: 6081 (or a sequence with no more than 1, 2, 3, 4, 5, or 6 mutations, e.g., substitutions, additions, or deletions, therefrom), a VLFWR2 amino acid sequence of SEQ ID NO: 6082 (or a sequence with no more than 1, 2, 3, 4, 5, or 6 mutations, e.g., substitutions, additions, or deletions, therefrom), a VLFWR3 amino acid sequence of SEQ ID NO: 6083 (or a sequence with no more than 1, 2, 3, 4, 5, or 6 mutations, e.g., substitutions, additions, or deletions, therefrom), or a VLFWR4 amino acid sequence of SEQ ID NO: 6084 (or a sequence with no more than 1, 2, 3, 4, 5, or 6 mutations, e.g., substitutions, additions, or deletions, therefrom).

[0185] 145. The multifunctional molecule of embodiment 144, wherein the NK cell engager comprises a light chain variable region (VL) comprising a light chain framework region 1 (VLFWR1) amino acid sequence of SEQ ID NO: 6081, a VLFWR2 amino acid sequence of SEQ ID NO: 6082, a VLFWR3 amino acid sequence of SEQ ID NO: 6083, or a VLFWR4 amino acid sequence of SEQ ID NO: 6084.

[0186] 146. The multifunctional molecule of embodiment 145, wherein the NK cell engager comprises a VL comprising the amino acid sequence of SEQ ID NO: 6138 (or an amino acid sequence having at least about 93%, 95%, or 99% sequence identity to SEQ ID NO: 6138).

[0187] 147. The multifunctional molecule of any of embodiments 103-116 or 123-140, wherein the NK cell engager comprises a light chain variable region (VL) comprising a light chain framework region 1 (VLFWR1) amino acid sequence of SEQ ID NO: 6085 (or a sequence with no more than 1, 2, 3, 4, 5, or 6 mutations, e.g., substitutions, additions, or deletions, therefrom), a VLFWR2 amino acid sequence of SEQ ID NO: 6086 (or a sequence with no more than 1, 2, 3, 4, 5, or 6 mutations, e.g., substitutions, additions, or deletions, therefrom), a VLFWR3 amino acid sequence of SEQ ID NO: 6087 (or a sequence with no more than 1, 2, 3, 4, 5, or 6 mutations, e.g., substitutions, additions, or deletions, therefrom), or a VLFWR4 amino acid sequence of SEQ ID NO: 6088 (or a sequence with no more than 1, 2, 3, 4, 5, or 6 mutations, e.g., substitutions, additions, or deletions, therefrom).

[0188] 148. The multifunctional molecule of embodiment 147, wherein the NK cell engager comprises a light chain variable region (VL) comprising a light chain framework region 1 (VLFWR1) amino acid sequence of SEQ ID NO: 6085, a VLFWR2 amino acid sequence of SEQ ID NO: 6086, a VLFWR3 amino acid sequence of SEQ ID NO: 6087, or a VLFWR4 amino acid sequence of SEQ ID NO: 6088.

[0189] 149. The multifunctional molecule of embodiment 148, wherein the NK cell engager comprises a VL comprising the amino acid sequence of SEQ ID NO: 6139 (or an amino acid sequence having at least about 93%, 95%, or 99% sequence identity to SEQ ID NO: 6139).

[0190] 150. The multifunctional molecule of any of embodiments 103-116 or 123-140, wherein the NK cell engager comprises a light chain variable region (VL) comprising a light chain framework region 1 (VLFWR1) amino acid sequence of SEQ ID NO: 6089 (or a sequence with no more than 1, 2, 3, 4, 5, or 6 mutations, e.g., substitutions, additions, or deletions, therefrom), a VLFWR2 amino acid sequence of SEQ ID NO: 6090 (or a sequence with no more than 1, 2, 3, 4, 5, or 6 mutations, e.g., substitutions, additions, or deletions, therefrom), a VLFWR3 amino acid sequence of SEQ ID NO: 6091 (or a sequence with no more than 1, 2, 3, 4, 5, or 6 mutations, e.g., substitutions, additions, or deletions, therefrom), or a VLFWR4 amino acid sequence of SEQ ID NO: 6092 (or a sequence with no more than 1, 2, 3, 4, 5, or 6 mutations, e.g., substitutions, additions, or deletions, therefrom).

[0191] 151. The multifunctional molecule of embodiment 150, wherein the NK cell engager comprises a light chain variable region (VL) comprising a light chain framework region 1 (VLFWR1) amino acid sequence of SEQ ID NO: 6089, a VLFWR2 amino acid sequence of SEQ ID NO: 6090, a VLFWR3 amino acid sequence of SEQ ID NO: 6091, or a VLFWR4 amino acid sequence of SEQ ID NO: 6092.

[0192] 152. The multifunctional molecule of embodiment 151, wherein the NK cell engager comprises a VL comprising the amino acid sequence of SEQ ID NO: 6140 (or an amino acid sequence having at least about 93%, 95%, or 99% sequence identity to SEQ ID NO: 6140).

[0193] 153. The multifunctional molecule of any of embodiments 103-116 or 123-140, wherein the NK cell engager comprises a light chain variable region (VL) comprising a light chain framework region 1 (VLFWR1) amino acid sequence of SEQ ID NO: 6093 (or a sequence with no more than 1, 2, 3, 4, 5, or 6 mutations, e.g., substitutions, additions, or deletions, therefrom), a VLFWR2 amino acid sequence of SEQ ID NO: 6094 (or a sequence with no more than 1, 2, 3, 4, 5, or 6 mutations, e.g., substitutions, additions, or deletions, therefrom), a VLFWR3 amino acid sequence of SEQ ID NO: 6095 (or a sequence with no more than 1, 2, 3, 4, 5, or 6 mutations, e.g., substitutions, additions, or deletions, therefrom), or a VLFWR4 amino acid sequence of SEQ ID NO: 6096 (or a sequence with no more than 1, 2, 3, 4, 5, or 6 mutations, e.g., substitutions, additions, or deletions, therefrom).

[0194] 154. The multifunctional molecule of embodiment 153, wherein the NK cell engager comprises a light chain variable region (VL) comprising a light chain framework region 1 (VLFWR1) amino acid sequence of SEQ ID NO: 6093, a VLFWR2 amino acid sequence of SEQ ID NO: 6094, a VLFWR3 amino acid sequence of SEQ ID NO: 6095, or a VLFWR4 amino acid sequence of SEQ ID NO: 6096.

[0195] 155. The multifunctional molecule of embodiment 154, wherein the NK cell engager comprises a VL comprising the amino acid sequence of SEQ ID NO: 6141 (or an amino acid sequence having at least about 93%, 95%, or 99% sequence identity to SEQ ID NO: 6141).

[0196] 156. The multifunctional molecule of any of embodiments 103-114, wherein the NK cell engager comprises:

(i) a heavy chain variable region (VH) comprising a heavy chain complementarity determining region 1 (VHCDR1) amino acid sequence of SEQ ID NO: 6007 (or a sequence with no more than 1, 2, 3, or 4 mutations, e.g., substitutions, additions, or deletions), a VHCDR2 amino acid sequence of SEQ ID NO: 6008 (or a sequence with no more than 1, 2, 3, or 4 mutations, e.g., substitutions, additions, or deletions), and/or a VHCDR3 amino acid sequence of SEQ ID NO: 6009 (or a sequence with no more than 1, 2, 3, or 4 mutations, e.g., substitutions, additions, or deletions), and
(ii) a light chain variable region (VL) comprising a light chain complementarity determining region 1 (VLCDR1) amino acid sequence of SEQ ID NO: 6070 (or a sequence with no more than 1, 2, 3, or 4 mutations, e.g., substitutions, additions, or deletions), a VLCDR2 amino acid sequence of SEQ ID NO: 6071 (or a sequence with no more than 1, 2, 3, or 4 mutations, e.g., substitutions, additions, or deletions), and/or a VLCDR3 amino acid sequence of SEQ ID NO: 6072 (or a sequence with no more than 1, 2, 3, or 4 mutations, e.g., substitutions, additions, or deletions).

[0197] 157. The multifunctional molecule of embodiment 156, wherein the NK cell engager comprises:

(i) a heavy chain variable region (VH) comprising a heavy chain complementarity determining region 1 (VHCDR1) amino acid sequence of SEQ ID NO: 6007, a VHCDR2 amino acid sequence of SEQ ID NO: 6008, and/or a VHCDR3 amino acid sequence of SEQ ID NO: 6009, and
(ii) a light chain variable region (VL) comprising a light chain complementarity determining region 1 (VLCDR1) amino acid sequence of SEQ ID NO: 6070, a VLCDR2 amino acid sequence of SEQ ID NO: 6071, and/or a VLCDR3 amino acid sequence of SEQ ID NO: 6072.

[0198] 158. The multifunctional molecule of any of embodiments 103-114, 156, or 157, wherein the NK cell engager comprises:

(1) a heavy chain variable region (VH) comprising a heavy chain framework region 1 (VHFWR1) amino acid sequence of SEQ ID NO: 6010 (or a sequence with no more than 1, 2, 3, 4, 5, or 6 mutations, e.g., substitutions, additions, or deletions, therefrom), a VHFWR2 amino acid sequence of SEQ ID NO: 6011 (or a sequence with no more than 1, 2, 3, 4, 5, or 6 mutations, e.g., substitutions, additions, or deletions, therefrom), a VHFWR3 amino acid sequence of SEQ ID NO: 6012 (or a sequence with no more than 1, 2, 3, 4, 5, or 6 mutations, e.g., substitutions, additions, or deletions, therefrom), or a VHFWR4 amino acid sequence of SEQ ID NO: 6013 (or a sequence with no more than 1, 2, 3, 4, 5, or 6 mutations, e.g., substitutions, additions, or deletions, therefrom), and/or
(2) a light chain variable region (VL) comprising a light chain framework region 1 (VLFWR1) amino acid sequence of SEQ ID NO: 6073 (or a sequence with no more than 1, 2, 3, 4, 5, or 6 mutations, e.g., substitutions, additions, or deletions, therefrom), a VLFWR2 amino acid sequence of SEQ ID NO: 6074 (or a sequence with no more than 1, 2, 3, 4, 5, or 6 mutations, e.g., substitutions, additions, or deletions, therefrom), a VLFWR3 amino acid sequence of SEQ ID NO: 6075 (or a sequence with no more than 1, 2, 3, 4, 5, or 6 mutations, e.g., substitutions, additions, or deletions, therefrom), or a VLFWR4 amino acid sequence of SEQ ID NO: 6076 (or a sequence with no more than 1, 2, 3, 4, 5, or 6 mutations, e.g., substitutions, additions, or deletions, therefrom).

[0199] 159. The multifunctional molecule of embodiment 158, wherein the NK cell engager comprises:

(1) a heavy chain variable region (VH) comprising a heavy chain framework region 1 (VHFWR1) amino acid sequence of SEQ ID NO: 6010, a VHFWR2 amino acid sequence of SEQ ID NO: 6011, a VHFWR3 amino acid sequence of SEQ ID NO: 6012, or a VHFWR4 amino acid sequence of SEQ ID NO: 6013, and
(3) a light chain variable region (VL) comprising a light chain framework region 1 (VLFWR1) amino acid sequence of SEQ ID NO: 6073, a VLFWR2 amino acid sequence of SEQ ID NO: 6074, a VLFWR3 amino acid sequence of SEQ ID NO: 6075, or a VLFWR4 amino acid sequence of SEQ ID NO: 6076.

[0200] 160. The multifunctional molecule of any one of embodiments 103-114 or 156-159, wherein the NK cell engager comprises:

(i) a VH comprising the amino acid sequence of SEQ ID NO: 6122 (or an amino acid sequence having at least about 75%, 80%, 85%, 90%, 95%, or 99% sequence identity to SEQ ID NO: 6122), and/or
(ii) a VL comprising the amino acid sequence of SEQ ID NO: 6136 (or an amino acid sequence having at least about 93%, 95%, or 99% sequence identity to SEQ ID NO: 6136).

[0201] 161. The multifunctional molecule of any of embodiments 103-114 or 156-160, wherein the NK cell engager comprises a heavy chain comprising the amino acid sequence of SEQ ID NOs: 6151 or 6152 (or an amino acid sequence having at least about 75%, 80%, 85%, 90%, 95%, or 99% sequence identity to SEQ ID NOs: 6151 or 6152).

[0202] 162. The multifunctional molecule of any of embodiments 103-114 or 156-161, wherein the NK cell engager comprises a light chain comprising the amino acid sequence of SEQ ID NO: 6153 (or an amino acid sequence having at least about 75%, 80%, 85%, 90%, 95%, or 99% sequence identity to SEQ ID NO: 6153).

[0203] 163. The multifunctional molecule of any of embodiments 103-114 or 156-162, wherein the NK cell engager comprises a heavy chain comprising the amino acid sequence of SEQ ID NOs: 6151 or 6152 (or an amino acid sequence having at least about 75%, 80%, 85%, 90%, 95%, or 99% sequence identity to SEQ ID NOs: 6151 or 6152), and a light chain comprising the amino acid sequence of SEQ ID NO: 6153 (or an amino acid sequence having at least about 75%, 80%, 85%, 90%, 95%, or 99% sequence identity to SEQ ID NO: 6153).

[0204] 164. The multifunctional molecule of any of embodiments 103-114, 156, or 157, wherein the NK cell engager comprises a heavy chain variable region (VH) comprising a heavy chain framework region 1 (VHFWR1) amino acid sequence of SEQ ID NO: 6039 (or a sequence with no more than 1, 2, 3, 4, 5, or 6 mutations, e.g., substitutions, additions, or deletions, therefrom), a VHFWR2 amino acid sequence of SEQ ID NO: 6040 (or a sequence with no more than 1, 2, 3, 4, 5, or 6 mutations, e.g., substitutions, additions, or deletions, therefrom), a VHFWR3 amino acid sequence of SEQ ID NO: 6041 (or a sequence with no more than 1, 2, 3, 4, 5, or 6 mutations, e.g., substitutions, additions, or deletions, therefrom), or a VHFWR4 amino acid sequence of SEQ ID NO: 6042 (or a sequence with no more than 1, 2, 3, 4, 5, or 6 mutations, e.g., substitutions, additions, or deletions, therefrom).

[0205] 165. The multifunctional molecule of embodiment 164, wherein the NK cell engager comprises a heavy chain variable region (VH) comprising a heavy chain framework region 1 (VHFWR1) amino acid sequence of SEQ ID NO: 6039, a VHFWR2 amino acid sequence of SEQ ID NO: 6040, a VHFWR3 amino acid sequence of SEQ ID NO: 6041, or a VHFWR4 amino acid sequence of SEQ ID NO: 6042.

[0206] 166. The multifunctional molecule of embodiment 165, wherein the NK cell engager comprises a VH comprising the amino acid sequence of SEQ ID NO: 6129 (or an amino acid sequence having at least about 75%, 80%, 85%, 90%, 95%, or 99% sequence identity to SEQ ID NO: 6129).

[0207] 167. The multifunctional molecule of any of embodiments 103-114, 156, or 157, wherein the NK cell engager comprises a heavy chain variable region (VH) comprising a heavy chain framework region 1 (VHFWR1) amino acid sequence of SEQ ID NO: 6043 (or a sequence with no more than 1, 2, 3, 4, 5, or 6 mutations, e.g., substitutions, additions, or deletions, therefrom), a VHFWR2 amino acid sequence of SEQ ID NO: 6044 (or a sequence with no more than 1, 2, 3, 4, 5, or 6 mutations, e.g., substitutions, additions, or deletions, therefrom), a VHFWR3 amino acid sequence of SEQ ID NO: 6045 (or a sequence with no more than 1, 2, 3, 4, 5, or 6 mutations, e.g., substitutions, additions, or deletions, therefrom), or a VHFWR4 amino acid sequence of SEQ ID NO: 6046 (or a sequence with no more than 1, 2, 3, 4, 5, or 6 mutations, e.g., substitutions, additions, or deletions, therefrom).

[0208] 168. The multifunctional molecule of embodiment 167, wherein the NK cell engager comprises a heavy chain variable region (VH) comprising a heavy chain framework region 1 (VHFWR1) amino acid sequence of SEQ ID NO: 6043, a VHFWR2 amino acid sequence of SEQ ID NO: 6044, a VHFWR3 amino acid sequence of SEQ ID NO: 6045, or a VHFWR4 amino acid sequence of SEQ ID NO: 6046.

[0209] 169. The multifunctional molecule of embodiment 168, wherein the NK cell engager comprises a VH comprising the amino acid sequence of SEQ ID NO: 6130 (or an amino acid sequence having at least about 75%, 80%, 85%, 90%, 95%, or 99% sequence identity to SEQ ID NO: 6130).

[0210] 170. The multifunctional molecule of any of embodiments 103-114, 156, or 157, wherein the NK cell engager comprises a heavy chain variable region (VH) comprising a heavy chain framework region 1 (VHFWR1) amino acid sequence of SEQ ID NO: 6047 (or a sequence with no more than 1, 2, 3, 4, 5, or 6 mutations, e.g., substitutions, additions, or deletions, therefrom), a VHFWR2 amino acid sequence of SEQ ID NO: 6048 (or a sequence with no more than 1, 2, 3, 4, 5, or 6 mutations, e.g., substitutions, additions, or deletions, therefrom), a VHFWR3 amino acid sequence of SEQ ID NO: 6049 (or a sequence with no more than 1, 2, 3, 4, 5, or 6 mutations, e.g., substitutions, additions, or deletions, therefrom), or a VHFWR4 amino acid sequence of SEQ ID NO: 6050 (or a sequence with no more than 1, 2, 3, 4, 5, or 6 mutations, e.g., substitutions, additions, or deletions, therefrom).

[0211] 171. The multifunctional molecule of embodiment 170, wherein the NK cell engager comprises a heavy chain variable region (VH) comprising a heavy chain framework region 1 (VHFWR1) amino acid sequence of SEQ ID NO: 6047, a VHFWR2 amino acid sequence of SEQ ID NO: 6048, a VHFWR3 amino acid sequence of SEQ ID NO: 6049, or a VHFWR4 amino acid sequence of SEQ ID NO: 6050.

[0212] 172. The multifunctional molecule of embodiment 171, wherein the NK cell engager comprises a VH comprising the amino acid sequence of SEQ ID NO: 6131 (or an amino acid sequence having at least about 75%, 80%, 85%, 90%, 95%, or 99% sequence identity to SEQ ID NO: 6131).

[0213] 173. The multifunctional molecule of any of embodiments 103-114, 156, or 157, wherein the NK cell engager comprises a heavy chain variable region (VH) comprising a heavy chain framework region 1 (VHFWR1) amino acid sequence of SEQ ID NO: 6051 (or a sequence with no more than 1, 2, 3, 4, 5, or 6 mutations, e.g., substitutions, additions, or deletions, therefrom), a VHFWR2 amino acid sequence of SEQ ID NO: 6052 (or a sequence with no more than 1, 2, 3, 4, 5, or 6 mutations, e.g., substitutions, additions, or deletions, therefrom), a VHFWR3 amino acid sequence of SEQ ID NO: 6053 (or a sequence with no more than 1, 2, 3, 4, 5, or 6 mutations, e.g., substitutions, additions, or deletions, therefrom), or a VHFWR4 amino acid sequence of SEQ ID NO: 6054 (or a sequence with no more than 1, 2, 3, 4, 5, or 6 mutations, e.g., substitutions, additions, or deletions, therefrom).

[0214] 174. The multifunctional molecule of embodiment 173, wherein the NK cell engager comprises a heavy chain variable region (VH) comprising a heavy chain framework region 1 (VHFWR1) amino acid sequence of SEQ ID NO: 6051, a VHFWR2 amino acid sequence of SEQ ID NO: 6052, a VHFWR3 amino acid sequence of SEQ ID NO: 6053, or a VHFWR4 amino acid sequence of SEQ ID NO: 6054.

[0215] 175. The multifunctional molecule of embodiment 174, wherein the NK cell engager comprises a VH comprising the amino acid sequence of SEQ ID NO: 6132 (or an amino acid sequence having at least about 75%, 80%, 85%, 90%, 95%, or 99% sequence identity to SEQ ID NO: 6132).

[0216] 176. The multifunctional molecule of any of embodiments 103-114, 156, or 157, wherein the NK cell engager comprises a heavy chain variable region (VH) comprising a heavy chain framework region 1 (VHFWR1) amino acid sequence of SEQ ID NO: 6055 (or a sequence with no more than 1, 2, 3, 4, 5, or 6 mutations, e.g., substitutions, additions, or deletions, therefrom), a VHFWR2 amino acid sequence of SEQ ID NO: 6056 (or a sequence with no more than 1, 2, 3, 4, 5, or 6 mutations, e.g., substitutions, additions, or deletions, therefrom), a VHFWR3 amino acid sequence of SEQ ID NO: 6057 (or a sequence with no more than 1, 2, 3, 4, 5, or 6 mutations, e.g., substitutions, additions, or deletions, therefrom), or a VHFWR4 amino acid sequence of SEQ ID NO: 6058 (or a sequence with no more than 1, 2, 3, 4, 5, or 6 mutations, e.g., substitutions, additions, or deletions, therefrom).

[0217] 177. The multifunctional molecule of embodiment 176, wherein the NK cell engager comprises a heavy chain variable region (VH) comprising a heavy chain framework region 1 (VHFWR1) amino acid sequence of SEQ ID NO: 6055, a VHFWR2 amino acid sequence of SEQ ID NO: 6056, a VHFWR3 amino acid sequence of SEQ ID NO: 6057, or a VHFWR4 amino acid sequence of SEQ ID NO: 6058.

[0218] 178. The multifunctional molecule of embodiment 177, wherein the NK cell engager comprises a VH comprising the amino acid sequence of SEQ ID NO: 6133 (or an amino acid sequence having at least about 75%, 80%, 85%, 90%, 95%, or 99% sequence identity to SEQ ID NO: 6133).

[0219] 179. The multifunctional molecule of any of embodiments 103-114, 156, or 157, wherein the NK cell engager comprises a heavy chain variable region (VH) comprising a heavy chain framework region 1 (VHFWR1) amino acid sequence of SEQ ID NO: 6059 (or a sequence with no more than 1, 2, 3, 4, 5, or 6 mutations, e.g., substitutions, additions, or deletions, therefrom), a VHFWR2 amino acid sequence of SEQ ID NO: 6060 (or a sequence with no more than 1, 2, 3, 4, 5, or 6 mutations, e.g., substitutions, additions, or deletions, therefrom), a VHFWR3 amino acid sequence of SEQ ID NO: 6061 (or a sequence with no more than 1, 2, 3, 4, 5, or 6 mutations, e.g., substitutions, additions, or deletions, therefrom), or a VHFWR4 amino acid sequence of SEQ ID NO: 6062 (or a sequence with no more than 1, 2, 3, 4, 5, or 6 mutations, e.g., substitutions, additions, or deletions, therefrom).

[0220] 180. The multifunctional molecule of embodiment 179, wherein the NK cell engager comprises a heavy chain variable region (VH) comprising a heavy chain framework region 1 (VHFWR1) amino acid sequence of SEQ ID NO: 6059, a VHFWR2 amino acid sequence of SEQ ID NO: 6060, a VHFWR3 amino acid sequence of SEQ ID NO: 6061, or a VHFWR4 amino acid sequence of SEQ ID NO: 6062.

[0221] 181. The multifunctional molecule of embodiment 180, wherein the NK cell engager comprises a VH comprising the amino acid sequence of SEQ ID NO: 6134 (or an amino acid sequence having at least about 75%, 80%, 85%, 90%, 95%, or 99% sequence identity to SEQ ID NO: 6134).

[0222] 182. The multifunctional molecule of any of embodiments 103-114, 156, 157, or 164-181, wherein the NK cell engager comprises a light chain variable region (VL) comprising a light chain framework region 1 (VLFWR1) amino acid sequence of SEQ ID NO: 6097 (or a sequence with no more than 1, 2, 3, 4, 5, or 6 mutations, e.g., substitutions, additions, or deletions, therefrom), a VLFWR2 amino acid sequence of SEQ ID NO: 6098 (or a sequence with no more than 1, 2, 3, 4, 5, or 6 mutations, e.g., substitutions, additions, or deletions, therefrom), a VLFWR3 amino acid sequence of SEQ ID NO: 6099 (or a sequence with no more than 1, 2, 3, 4, 5, or 6 mutations, e.g., substitutions, additions, or deletions, therefrom), or a VLFWR4 amino acid sequence of SEQ ID NO: 6100 (or a sequence with no more than 1, 2, 3, 4, 5, or 6 mutations, e.g., substitutions, additions, or deletions, therefrom).

[0223] 183. The multifunctional molecule of embodiment 182, wherein the NK cell engager comprises a light chain variable region (VL) comprising a light chain framework region 1 (VLFWR1) amino acid sequence of SEQ ID NO: 6097, a VLFWR2 amino acid sequence of SEQ ID NO: 6098, a VLFWR3 amino acid sequence of SEQ ID NO: 6099, or a VLFWR4 amino acid sequence of SEQ ID NO: 6100.

[0224] 184. The multifunctional molecule of embodiment 183, wherein the NK cell engager comprises a VL comprising the amino acid sequence of SEQ ID NO: 6142 (or an amino acid sequence having at least about 93%, 95%, or 99% sequence identity to SEQ ID NO: 6142).

[0225] 185. The multifunctional molecule of any of embodiments 103-114, 156, 157, or 164-181, wherein the NK cell engager comprises a light chain variable region (VL) comprising a light chain framework region 1 (VLFWR1) amino acid sequence of SEQ ID NO: 6101 (or a sequence with no more than 1, 2, 3, 4, 5, or 6 mutations, e.g., substitutions, additions, or deletions, therefrom), a VLFWR2 amino acid sequence of SEQ ID NO: 6102 (or a sequence with no more than 1, 2, 3, 4, 5, or 6 mutations, e.g., substitutions, additions, or deletions, therefrom), a VLFWR3 amino acid sequence of SEQ ID NO: 6103 (or a sequence with no more than 1, 2, 3, 4, 5, or 6 mutations, e.g., substitutions, additions, or deletions, therefrom), or a VLFWR4 amino acid sequence of SEQ ID NO: 6104 (or a sequence with no more than 1, 2, 3, 4, 5, or 6 mutations, e.g., substitutions, additions, or deletions, therefrom).

[0226] 186. The multifunctional molecule of embodiment 185, wherein the NK cell engager comprises a light chain variable region (VL) comprising a light chain framework region 1 (VLFWR1) amino acid sequence of SEQ ID NO: 6101, a VLFWR2 amino acid sequence of SEQ ID NO: 6102, a VLFWR3 amino acid sequence of SEQ ID NO: 6103, or a VLFWR4 amino acid sequence of SEQ ID NO: 6104.

[0227] 187. The multifunctional molecule of embodiment 186, wherein the NK cell engager comprises a VL comprising the amino acid sequence of SEQ ID NO: 6143 (or an amino acid sequence having at least about 93%, 95%, or 99% sequence identity to SEQ ID NO: 6143).

[0228] 188. The multifunctional molecule of any of embodiments 103-114, 156, 157, or 164-181, wherein the NK cell engager comprises a light chain variable region (VL) comprising a light chain framework region 1 (VLFWR1) amino acid sequence of SEQ ID NO: 6105 (or a sequence with no more than 1, 2, 3, 4, 5, or 6 mutations, e.g., substitutions, additions, or deletions, therefrom), a VLFWR2 amino acid sequence of SEQ ID NO: 6106 (or a sequence with no more than 1, 2, 3, 4, 5, or 6 mutations, e.g., substitutions, additions, or deletions, therefrom), a VLFWR3 amino acid sequence of SEQ ID NO: 6107 (or a sequence with no more than 1, 2, 3, 4, 5, or 6 mutations, e.g., substitutions, additions, or deletions, therefrom), or a VLFWR4 amino acid sequence of SEQ ID NO: 6108 (or a sequence with no more than 1, 2, 3, 4, 5, or 6 mutations, e.g., substitutions, additions, or deletions, therefrom).

[0229] 189. The multifunctional molecule of embodiment 188, wherein the NK cell engager comprises a light chain variable region (VL) comprising a light chain framework region 1 (VLFWR1) amino acid sequence of SEQ ID NO: 6105, a VLFWR2 amino acid sequence of SEQ ID NO: 6106, a VLFWR3 amino acid sequence of SEQ ID NO: 6107, or a VLFWR4 amino acid sequence of SEQ ID NO: 6108.

[0230] 190. The multifunctional molecule of embodiment 189, wherein the NK cell engager comprises a VL comprising the amino acid sequence of SEQ ID NO: 6144 (or an amino acid sequence having at least about 93%, 95%, or 99% sequence identity to SEQ ID NO: 6144).

[0231] 191. The multifunctional molecule of any of embodiments 103-114, 156, 157, or 164-181, wherein the NK cell engager comprises a light chain variable region (VL) comprising a light chain framework region 1 (VLFWR1) amino acid sequence of SEQ ID NO: 6109 (or a sequence with no more than 1, 2, 3, 4, 5, or 6 mutations, e.g., substitutions, additions, or deletions, therefrom), a VLFWR2 amino acid sequence of SEQ ID NO: 6110 (or a sequence with no more than 1, 2, 3, 4, 5, or 6 mutations, e.g., substitutions, additions, or deletions, therefrom), a VLFWR3 amino acid sequence of SEQ ID NO: 6111 (or a sequence with no more than 1, 2, 3, 4, 5, or 6 mutations, e.g., substitutions, additions, or deletions, therefrom), or a VLFWR4 amino acid sequence of SEQ ID NO: 6112 (or a sequence with no more than 1, 2, 3, 4, 5, or 6 mutations, e.g., substitutions, additions, or deletions, therefrom).

[0232] 192. The multifunctional molecule of embodiment 191, wherein the NK cell engager comprises a light chain variable region (VL) comprising a light chain framework region 1 (VLFWR1) amino acid sequence of SEQ ID NO: 6109, a VLFWR2 amino acid sequence of SEQ ID NO: 6110, a VLFWR3 amino acid sequence of SEQ ID NO: 6111, or a VLFWR4 amino acid sequence of SEQ ID NO: 6112.

[0233] 193. The multifunctional molecule of embodiments 192, wherein the NK cell engager comprises a VL comprising the amino acid sequence of SEQ ID NO: 6145 (or an amino acid sequence having at least about 93%, 95%, or 99% sequence identity to SEQ ID NO: 6145).

[0234] 194. The multifunctional molecule of any of embodiments 103-114, 156, 157, or 164-181, wherein the NK cell engager comprises a light chain variable region (VL) comprising a light chain framework region 1 (VLFWR1) amino acid sequence of SEQ ID NO: 6113 (or a sequence with no more than 1, 2, 3, 4, 5, or 6 mutations, e.g., substitutions, additions, or deletions, therefrom), a VLFWR2 amino acid sequence of SEQ ID NO: 6114 (or a sequence with no more than 1, 2, 3, 4, 5, or 6 mutations, e.g., substitutions, additions, or deletions, therefrom), a VLFWR3 amino acid sequence of SEQ ID NO: 6115 (or a sequence with no more than 1, 2, 3, 4, 5, or 6 mutations, e.g., substitutions, additions, or deletions, therefrom), or a VLFWR4 amino acid sequence of SEQ ID NO: 6116 (or a sequence with no more than 1, 2, 3, 4, 5, or 6 mutations, e.g., substitutions, additions, or deletions, therefrom).

[0235] 195. The multifunctional molecule of embodiment 194, wherein the NK cell engager comprises a light chain variable region (VL) comprising a light chain framework region 1 (VLFWR1) amino acid sequence of SEQ ID NO: 6113, a VLFWR2 amino acid sequence of SEQ ID NO: 6114, a VLFWR3 amino acid sequence of SEQ ID NO: 6115, or a VLFWR4 amino acid sequence of SEQ ID NO: 6116.

[0236] 196. The multifunctional molecule of embodiment 195, wherein the NK cell engager comprises a VL comprising the amino acid sequence of SEQ ID NO: 6146 (or an amino acid sequence having at least about 93%, 95%, or 99% sequence identity to SEQ ID NO: 6146).

[0237] 197. The multifunctional molecule of any of embodiments 103-114, 156, 157, or 164-181, wherein the NK cell engager comprises a light chain variable region (VL) comprising a light chain framework region 1 (VLFWR1) amino acid sequence of SEQ ID NO: 6117 (or a sequence with no more than 1, 2, 3, 4, 5, or 6 mutations, e.g., substitutions, additions, or deletions, therefrom), a VLFWR2 amino acid sequence of SEQ ID NO: 6118 (or a sequence with no more than 1, 2, 3, 4, 5, or 6 mutations, e.g., substitutions, additions, or deletions, therefrom), a VLFWR3 amino acid sequence of SEQ ID NO: 6119 (or a sequence with no more than 1, 2, 3, 4, 5, or 6 mutations, e.g., substitutions, additions, or deletions, therefrom), or a VLFWR4 amino acid sequence of SEQ ID NO: 6120 (or a sequence with no more than 1, 2, 3, 4, 5, or 6 mutations, e.g., substitutions, additions, or deletions, therefrom).

[0238] 198. The multifunctional molecule of embodiment 197, wherein the NK cell engager comprises a light chain variable region (VL) comprising a light chain framework region 1 (VLFWR1) amino acid sequence of SEQ ID NO: 6117, a VLFWR2 amino acid sequence of SEQ ID NO: 6118, a VLFWR3 amino acid sequence of SEQ ID NO: 6119, or a VLFWR4 amino acid sequence of SEQ ID NO: 6120.

[0239] 199. The multifunctional molecule of embodiment 198, wherein the NK cell engager comprises a VL comprising the amino acid sequence of SEQ ID NO: 6147 (or an amino acid sequence having at least about 93%, 95%, or 99% sequence identity to SEQ ID NO: 6147).

[0240] 200. The multifunctional molecule of any of embodiments 103-106, wherein the NK cell engager is an antibody molecule, e.g., an antigen binding domain, that binds to NKp46.

[0241] 201. The multifunctional molecule of embodiment 200, wherein lysis of the lymphoma cell is mediated by NKp46.

[0242] 202. The multifunctional molecule of either of embodiments 200 or 201, wherein the multifunctional molecule does not activate the NK cell when incubated with the NK cell in the absence of the TCRBV antigen (e.g., a TCRBV antigen corresponding to a biased TCRBV clonotype).

[0243] 203. The multifunctional molecule of any one of embodiments 200-202, wherein the multifunctional molecule activates the NK cell when the NK cell is a NKp46 expressing NK cell and the TCRBV antigen (e.g., a TCRBV antigen corresponding to a biased TCRBV clonotype) is also present.

[0244] 204. The multifunctional molecule of any one of embodiments 200-203, wherein the multifunctional molecule does not activate the NK cell when the NK cell is not a NKp46 expressing NK cell and the TCRBV antigen (e.g., a TCRBV antigen corresponding to a biased TCRBV clonotype) is also present.

[0245] 205. The multifunctional molecule of any one of embodiments 200-204, wherein the NK cell engager comprises a VH comprising the amino acid sequence of SEQ ID NO: 6182 (or an amino acid sequence having at least about 75%, 80%, 85%, 90%, 95%, or 99% sequence identity to SEQ ID NO: 6182).

[0246] 206. The multifunctional molecule of any one of embodiments 200-205, wherein the NK cell engager comprises a VL comprising the amino acid sequence of SEQ ID NO: 6183 (or an amino acid sequence having at least about 93%, 95%, or 99% sequence identity to SEQ ID NO: 6183).

[0247] 207. The multifunctional molecule of 200-205, wherein the NK cell engager comprises an scFv comprising the amino acid sequence of SEQ ID NO: 6181 (or an amino acid sequence having at least about 93%, 95%, or 99% sequence identity to SEQ ID NO: 6181).

[0248] 208. The multifunctional molecule of any of embodiments 103-106, wherein the NK cell engager is an antibody molecule, e.g., an antigen binding domain, that binds to NKG2D.

[0249] 209. The multifunctional molecule of embodiment 208, wherein lysis of the lymphoma cell is mediated by NKG2D.

[0250] 210. The multifunctional molecule of either of embodiments 208 or 209, wherein the multifunctional molecule does not activate the NK cell when incubated with the NK cell in the absence of the TCRBV antigen (e.g., a TCRBV antigen corresponding to a biased TCRBV clonotype).

[0251] 211. The multifunctional molecule of any one of embodiments 208-210, wherein the multifunctional molecule activates the NK cell when the NK cell is a NKG2D expressing NK cell and the TCRBV antigen (e.g., a TCRBV antigen corresponding to a biased TCRBV clonotype) is also present.

[0252] 212. The multifunctional molecule of any one of embodiments 208-211, wherein the multifunctional molecule does not activate the NK cell when the NK cell is not a NKG2D expressing NK cell and the TCRBV antigen (e.g., a TCRBV antigen corresponding to a biased TCRBV clonotype) is also present.

[0253] 213. The multifunctional molecule of any one of embodiments 208-212, wherein the NK cell engager comprises a VH comprising the amino acid sequence of SEQ ID NO: 6176 (or an amino acid sequence having at least about 75%, 80%, 85%, 90%, 95%, or 99% sequence identity to SEQ ID NO: 6176).

[0254] 214. The multifunctional molecule of any one of embodiments 208-213, wherein the NK cell engager comprises a VL comprising the amino acid sequence of SEQ ID NO: 6177 (or an amino acid sequence having at least about 93%, 95%, or 99% sequence identity to SEQ ID NO: 6177).

[0255] 215. The multifunctional molecule of any of embodiments 208-214, wherein the NK cell engager comprises an scFv comprising the amino acid sequence of SEQ ID NO: 6175 (or an amino acid sequence having at least about 93%, 95%, or 99% sequence identity to SEQ ID NO: 6175).

[0256] 216. The multifunctional molecule of any one of embodiments 208-212, wherein the NK cell engager comprises a VH comprising the amino acid sequence of SEQ ID NO: 6179 (or an amino acid sequence having at least about 75%, 80%, 85%, 90%, 95%, or 99% sequence identity to SEQ ID NO: 6179).

[0257] 217. The multifunctional molecule of any one of embodiments 208-212 or 216 wherein the NK cell engager comprises a VL comprising the amino acid sequence of SEQ ID NO: 6180 (or an amino acid sequence having at least about 93%, 95%, or 99% sequence identity to SEQ ID NO: 6180).

[0258] 218. The multifunctional molecule of any of embodiments 208-212, 216, or 217, wherein the NK cell engager comprises an scFv comprising the amino acid sequence of SEQ ID NO: 6178 (or an amino acid sequence having at least about 93%, 95%, or 99% sequence identity to SEQ ID NO: 6178).

[0259] 219. The multifunctional molecule of any of embodiments 103-106, wherein the NK cell engager is an antibody molecule, e.g., an antigen binding domain, that binds to CD16.

[0260] 220. The multifunctional molecule of embodiment 219, wherein lysis of the lymphoma cell is mediated by CD16.

[0261] 221. The multifunctional molecule of either of embodiments 219 or 220, wherein the multifunctional molecule does not activate the NK cell when incubated with the NK cell in the absence of the TCRBV antigen (e.g., a TCRBV antigen corresponding to a biased TCRBV clonotype).

[0262] 222. The multifunctional molecule of any one of embodiments 219-221, wherein the multifunctional molecule activates the NK cell when the NK cell is a CD16 expressing NK cell and the TCRBV antigen (e.g., a TCRBV antigen corresponding to a biased TCRBV clonotype) is also present.

[0263] 223. The multifunctional molecule of any one of embodiments 219-222, wherein the multifunctional molecule does not activate the NK cell when the NK cell is not a CD16 expressing NK cell and the TCRBV antigen (e.g., a TCRBV antigen corresponding to a biased TCRBV clonotype) is also present.

[0264] 224. The multifunctional molecule of any one of embodiments 219-223, wherein the NK cell engager comprises a VH comprising the amino acid sequence of SEQ ID NO: 6185 (or an amino acid sequence having at least about 75%, 80%, 85%, 90%, 95%, or 99% sequence identity to SEQ ID NO: 6185).

[0265] 225. The multifunctional molecule of any one of embodiments 219-224, wherein the NK cell engager comprises a VL comprising the amino acid sequence of SEQ ID NO: 6186 (or an amino acid sequence having at least about 93%, 95%, or 99% sequence identity to SEQ ID NO: 6186).

[0266] 226. The multifunctional molecule of any of embodiments 219-225, wherein the NK cell engager comprises an scFv comprising the amino acid sequence of SEQ ID NO: 6184 (or an amino acid sequence having at least about 93%, 95%, or 99% sequence identity to SEQ ID NO: 6184).

[0267] 227. The multifunctional molecule of embodiment 103, wherein the NK cell engager is a ligand, optionally, the ligand further comprises an immunoglobulin constant region, e.g., an Fc region.

[0268] 228. The multifunctional molecule of embodiment 227, wherein the NK cell engager is a ligand of NKp44 or NKp46, e.g., a viral HA.

[0269] 229. The multifunctional molecule of embodiment 227, wherein the NK cell engager is a ligand of DAP10, e.g., a coreceptor for NKG2D.

[0270] 230. The multifunctional molecule of embodiment 227, wherein the NK cell engager is a ligand of CD16, e.g., a CD16a/b ligand, e.g., a CD16a/b ligand further comprising an antibody Fc region.

[0271] 231. The multifunctional molecule of any one of embodiments 98-100, wherein the immune cell engager mediates binding to, or activation of, or both of, one or more of a B cell, a macrophage, and/or a dendritic cell.

[0272] 232. The multifunctional molecule of embodiment 231, wherein the immune cell engager comprises a B cell, macrophage, and/or dendritic cell engager chosen from one or more of CD40 ligand (CD40L) or a CD70 ligand; an antibody molecule that binds to CD40 or CD70; an antibody molecule to OX40; an OX40 ligand (OX40L); an agonist of a Toll-like receptor (e.g., a TLR4, e.g., a constitutively active TLR4 (caTLR4) or a TLR9 agonist); a 41BB; a CD2 agonist; a CD47; or a STING agonist, or a combination thereof.

[0273] 233. The multifunctional molecule of any one of embodiments 98-100, wherein the immune cell engager is a B cell engager, e.g., a CD40L, an OX40L, or a CD70 ligand, or an antibody molecule that binds to OX40, CD40 or CD70.

[0274] 234. The multifunctional molecule of any one of embodiments 98-100, wherein the immune cell engager is a macrophage cell engager, e.g., a CD2 agonist; a CD40L; an OX40L; an antibody molecule that binds to OX40, CD40 or CD70; an agonist of a Toll-like receptor (TLR) (e.g., a TLR4, e.g., a constitutively active TLR4 (caTLR4) or a TLR9 agonist); CD47; or a STING agonist.

[0275] 235. The multifunctional molecule of any one of embodiments 98-100, wherein the immune cell engager is a dendritic cell engager, e.g., a CD2 agonist, an OX40 antibody, an OX40L, 41BB agonist, a Toll-like receptor agonist or a fragment thereof (e.g., a TLR4, e.g., a constitutively active TLR4 (caTLR4)), CD47 agonist, or a STING agonist.

[0276] 236. The multifunctional molecule of embodiment 234 or 235, wherein the STING agonist comprises a cyclic dinucleotide, e.g., a cyclic di-GMP (cdGMP), a cyclic di-AMP (cdAMP), or a combination thereof, optionally with 2′,5′ or 3′,5′ phosphate linkages, e.g., wherein the STING agonist is covalently coupled to the multifunctional molecule.

[0277] 237. The multifunctional molecule of any one of embodiments 1-97, wherein the multifunctional molecule comprises a cytokine molecule.

[0278] 238. The multifunctional molecule of embodiment 237, wherein the cytokine molecule is chosen from interleukin-2 (IL-2), interleukin-7 (IL-7), interleukin-12 (IL-12), interleukin-15 (IL-15), interleukin-18 (IL-18), interleukin-21 (IL-21), or interferon gamma, or a fragment or variant thereof, or a combination of any of the aforesaid cytokines.

[0279] 239. The multifunctional molecule of embodiment 237 or 238, wherein the cytokine molecule is a monomer or a dimer.

[0280] 240. The multifunctional molecule of any one of embodiments 237-239, wherein the cytokine molecule further comprises a receptor dimerizing domain, e.g., an IL15Ralpha dimerizing domain.

[0281] 241. The multifunctional molecule of embodiment 240, wherein the cytokine molecule (e.g., IL-15) and the receptor dimerizing domain (e.g., an IL15Ralpha dimerizing domain) are not covalently linked, e.g., are non-covalently associated.

[0282] 242. The multifunctional molecule of any of embodiments 1-97, wherein the multifunctional molecule comprises a cytokine inhibitor molecule.

[0283] 243. The multifunctional molecule of embodiment 242, wherein the cytokine inhibitor molecule is a TGF-beta inhibitor.

[0284] 244. The multifunctional molecule of either of embodiments 242 or 243, wherein the TGF-beta inhibitor inhibits (e.g., reduces the activity of): (i) TGF-beta 1; (ii) TGF-beta 2; (iii) TGF-beta 3; (iv) (i) and (ii); (v) (i) and (iii); (vi) (ii) and (iii); or (vii) (i), (ii), and (iii).

[0285] 245. The multifunctional molecule of any of embodiments 242-244, wherein the TGF-beta inhibitor comprises a portion of a TGF-beta receptor (e.g., an extracellular domain of a TGF-beta receptor) that is capable of inhibiting (e.g., reducing the activity of) TGF-beta, or functional fragment or variant thereof.

[0286] 246. The multifunctional molecule of embodiment 245, wherein the TGF-beta inhibitor comprises a portion of (i) TGFBR1; (ii) TGFBR2; (iii) TGFBR3; (iv) (i) and (ii); (v) (i) and (iii); (vi) (ii) and (iii); or (vii) (i), (ii), and (iii).

[0287] 247. The multifunctional molecule of any of embodiments 242-246, wherein the TGF-beta inhibitor comprises an amino acid sequence selected from Table 16, or an amino acid sequence having at least about 93%, 95%, or 99% sequence identity thereto.

[0288] 248. The multifunctional molecule of any of embodiments 1-97, wherein the multifunctional molecule comprises a death receptor signal engager chosen from a TNF-related apoptosis-inducing ligand (TRAIL) molecule, a death receptor molecule, or an antigen binding domain that specifically binds to a death receptor.

[0289] 249. The multifunctional molecule of embodiment 248, wherein the death receptor signal engager activates death receptor signaling in the lymphocyte (e.g., T cell) comprising the TCRBV antigen, e.g., and induces apoptosis or cell death in said cell.

[0290] 250. The multifunctional molecule of either of embodiments 248 or 249, wherein the death receptor signal engager does not activate death receptor signaling on cells other than lymphocytes comprising the TCRBV antigen.

[0291] 251. The multifunctional molecule of any of embodiments 248-250, wherein the death receptor signal engager comprises a TRAIL molecule, e.g., one or more TRAIL polypeptides or a fragment thereof.

[0292] 252. The multifunctional molecule of embodiment 251, wherein the TRAIL molecule specifically binds to Death Receptor 4 (DR4) or Death Receptor 5 (DR5).

[0293] 253. The multifunctional molecule of either of embodiments 251 or 252, wherein the TRAIL molecule comprises a truncated TRAIL polypeptide, e.g., relative to a wild-type TRAIL polypeptide.

[0294] 254. The multifunctional molecule of embodiment 253, wherein the TRAIL molecule comprises at least residues corresponding to amino acids 95-281 of human TRAIL, e.g., a truncated TRAIL molecule comprising residues corresponding to amino acids 95-281 of human TRAIL.

[0295] 255. The multifunctional molecule of embodiment 254, wherein the TRAIL molecule comprises a truncated TRAIL polypeptide comprising amino acids 95-281 of human TRAIL, e.g., and not amino acids 1-94 of human TRAIL.

[0296] 256. The multifunctional molecule of embodiment 253, wherein the TRAIL molecule comprises at least residues corresponding to amino acids 122-281 of human TRAIL, e.g., a truncated TRAIL molecule comprising residues corresponding to amino acids 122-281 of human TRAIL.

[0297] 257. The multifunctional molecule of embodiment 256, wherein the TRAIL molecule comprises a truncated TRAIL polypeptide comprising amino acids 122-281 of human TRAIL, e.g., and not amino acids 1-121 of human TRAIL.

[0298] 258. The multifunctional molecule of any of embodiments 251-257, wherein the death receptor signal engager comprises one, two, or three TRAIL molecules.

[0299] 259. The multifunctional molecule of any of embodiments 248-250, wherein the death receptor signal engager comprises an antigen binding domain that specifically binds to a death receptor, e.g., Death Receptor 4 (DR4) or Death Receptor 5 (DR5).

[0300] 260. The multifunctional molecule of embodiment 259, wherein the death receptor signal engager comprises one, two, or three antigen binding domains that specifically binds to a death receptor.

[0301] 261. The multifunctional molecule of either of embodiments 259 or 260, wherein the antigen binding domain that specifically binds to a death receptor binds to DR5.

[0302] 262. The multifunctional molecule of any of embodiments 259-261, wherein the antigen binding domain that specifically binds to a death receptor comprises tigatuzumab, drozitumab, or conatumumab.

[0303] 263. The multifunctional molecule of any of embodiments 248-262, wherein the death receptor signal engager comprises an amino acid sequence selected from Table 11, or an amino acid sequence having at least about 75%, 80%, 85%, 90%, 95%, or 99% sequence identity thereto.

[0304] 264. The multifunctional molecule of any of embodiments 248-263, wherein the death receptor signal engager comprises an amino acid sequence of SEQ ID NO: 6157, or an amino acid sequence having at least about 75%, 80%, 85%, 90%, 95%, or 99% sequence identity thereto.

[0305] 265. The multifunctional molecule of any of embodiments 248-263, wherein the death receptor signal engager comprises an amino acid sequence of SEQ ID NO: 6158, or an amino acid sequence having at least about 75%, 80%, 85%, 90%, 95%, or 99% sequence identity thereto.

[0306] 266. The multifunctional molecule of any of embodiments 248-263, wherein the death receptor signal engager comprises an amino acid sequence of SEQ ID NO: 6159, or an amino acid sequence having at least about 75%, 80%, 85%, 90%, 95%, or 99% sequence identity thereto.

[0307] 267. The multifunctional molecule of any of embodiments 248-263, wherein the death receptor signal engager comprises an amino acid sequence of SEQ ID NO: 6160, or an amino acid sequence having at least about 75%, 80%, 85%, 90%, 95%, or 99% sequence identity thereto.

[0308] 268. The multifunctional molecule of any of embodiments 248-263, wherein the death receptor signal engager comprises an amino acid sequence of SEQ ID NO: 6161, or an amino acid sequence having at least about 75%, 80%, 85%, 90%, 95%, or 99% sequence identity thereto.

[0309] 269. The multifunctional molecule of any of embodiments 248-263, wherein the death receptor signal engager comprises an amino acid sequence of SEQ ID NO: 6162, or an amino acid sequence having at least about 75%, 80%, 85%, 90%, 95%, or 99% sequence identity thereto.

[0310] 270. The multifunctional molecule of any of embodiments 248-263, wherein the death receptor signal engager comprises an amino acid sequence of SEQ ID NO: 6163, or an amino acid sequence having at least about 75%, 80%, 85%, 90%, 95%, or 99% sequence identity thereto.

[0311] 271. The multifunctional molecule of any of embodiments 248-263, wherein the death receptor signal engager comprises an amino acid sequence of SEQ ID NO: 6164, or an amino acid sequence having at least about 75%, 80%, 85%, 90%, 95%, or 99% sequence identity thereto.

[0312] 272. The multifunctional molecule of any of embodiments 248-263, wherein the death receptor signal engager comprises an amino acid sequence of SEQ ID NO: 6165, or an amino acid sequence having at least about 75%, 80%, 85%, 90%, 95%, or 99% sequence identity thereto.

[0313] 273. The multifunctional molecule of embodiment 102, wherein the T cell engager binds to TCRβ.

[0314] 274. The multifunctional molecule of embodiment 273, wherein the T cell engager comprises an antigen binding domain (e.g., an antibody molecule or fragment thereof) that binds to (e.g., and in some embodiments activates) CD3.

[0315] 275. The multifunctional molecule of either of embodiments 273 or 274, wherein the T cell engager does not bind to the lymphocyte comprising the TCRBV antigen.

[0316] 276. The multifunctional molecule of any of embodiments 273-275, wherein the T cell engager does not activate the lymphocyte comprising the TCRBV.

[0317] 277. The multifunctional molecule of any one of embodiments 1-276, wherein the multifunctional molecule comprises:

(i) an immune cell engager (e.g., a T cell engager, an NK cell engager, a B cell engager, a dendritic cell engager, or a macrophage cell engager) and a cytokine molecule,
(ii) an immune cell engager (e.g., a T cell engager, an NK cell engager, a B cell engager, a dendritic cell engager, or a macrophage cell engager) and a cytokine inhibitor molecule,
(iii) an immune cell engager (e.g., a T cell engager, an NK cell engager, a B cell engager, a dendritic cell engager, or a macrophage cell engager) and a death receptor signal engager,
(iv) a cytokine molecule and a death receptor signal engager,
(v) a cytokine inhibitor molecule and a death receptor signal engager,
(vi) an immune cell engager (e.g., a T cell engager, an NK cell engager, a B cell engager, a dendritic cell engager, or a macrophage cell engager), a cytokine molecule, and a death receptor signal engager, or
(vii) an immune cell engager (e.g., a T cell engager, an NK cell engager, a B cell engager, a dendritic cell engager, or a macrophage cell engager), a cytokine inhibitor molecule, and a death receptor signal engager.

[0318] 278. The multifunctional molecule of any one of embodiments 1-277, wherein the multifunctional molecule comprises the following configuration:

[0319] A, B-[dimerization module]-C, -D, wherein:

(a) the dimerization module comprises an immunoglobulin constant domain, e.g., a heavy chain constant domain (e.g., a homodimeric or heterodimeric heavy chain constant region, e.g., an Fc region), or a constant domain of an immunoglobulin variable region (e.g., a Fab region); and
(b) A, B, C, and D are independently absent; (i) an antigen binding domain that selectively binds to a TCRBV antigen; (ii) an immune cell engager chosen from a T cell engager, an NK cell engager, a B cell engager, a dendritic cell engager, or a macrophage cell engager; (iii) a cytokine molecule or cytokine inhibitor molecule; (iv) a death receptor signal engager; or (v) a stromal modifying moiety, provided that:
at least one, two, or three of A, B, C, and D comprises an antigen binding domain that selectively binds to a TCRBV antigen, and
any of the remaining A, B, C, and D is absent or comprises one of an immune cell engager, a cytokine molecule, a cytokine inhibitor molecule, a death receptor signal engager, or a stromal modifying moiety.

[0320] 279. The multifunctional molecule of embodiment 278, wherein:

(1) A comprises an antigen binding domain that selectively binds to a TCRBV antigen, and B, C, or D comprises an immune cell engager, e.g., a T cell engager, e.g., an anti-CD3 antibody molecule;
(2) A comprises an antigen binding domain that selectively binds to a TCRBV antigen, and B, C, or D comprises an immune cell engager, e.g., an NK cell engager, e.g., an anti-NKp30, anti-NKp46, anti-NKG2D, or anti-CD16 antibody molecule;
(3) A comprises an antigen binding domain that selectively binds to a TCRBV antigen, and B, C, or D comprises a cytokine molecule;
(4) A comprises an antigen binding domain that selectively binds to a TCRBV antigen, and B, C, or D comprises a cytokine inhibitor molecule;
(5) A comprises an antigen binding domain that selectively binds to a TCRBV antigen, and B, C, or D comprises a death receptor signal engager;
(6) A comprises a first antigen binding domain that selectively binds to a TCRBV antigen, B comprises a second antigen binding domain that selectively binds to a TCRBV antigen, and C or D comprises an immune cell engager, e.g., a T cell engager, e.g., an anti-CD3 antibody molecule;
(7) A comprises a first antigen binding domain that selectively binds to a TCRBV antigen, B comprises a second antigen binding domain that selectively binds to a TCRBV antigen, and C or D comprises an immune cell engager, e.g., an NK cell engager, e.g., an anti-NKp30, anti-NKp46, anti-NKG2D, or anti-CD16 antibody molecule;
(8) A comprises a first antigen binding domain that selectively binds to a TCRBV antigen, B comprises a second antigen binding domain that selectively binds to a TCRBV antigen, and C or D comprises a cytokine molecule;
(9) A comprises a first antigen binding domain that selectively binds to a TCRBV antigen, B comprises a second antigen binding domain that selectively binds to a TCRBV antigen, and C or D comprises a cytokine inhibitor molecule;
(10) A comprises a first antigen binding domain that selectively binds to a TCRBV antigen, B comprises a second antigen binding domain that selectively binds to a TCRBV antigen, and C or D comprises a death receptor signal engager;
(11) A comprises a first antigen binding domain that selectively binds to a TCRBV antigen, C comprises a second antigen binding domain that selectively binds to a TCRBV antigen, and B or D comprises an immune cell engager, e.g., a T cell engager, e.g., an anti-CD3 antibody molecule;
(12) A comprises a first antigen binding domain that selectively binds to a TCRBV antigen, C comprises a second antigen binding domain that selectively binds to a TCRBV antigen, and B or D comprises an immune cell engager, e.g., an NK cell engager, e.g., an anti-NKp30, anti-NKp46, anti-NKG2D, or anti-CD16 antibody molecule;
(13) A comprises a first antigen binding domain that selectively binds to a TCRBV antigen, C comprises a second antigen binding domain that selectively binds to a TCRBV antigen, and B or D comprises a cytokine molecule;
(14) A comprises a first antigen binding domain that selectively binds to a TCRBV antigen, C comprises a second antigen binding domain that selectively binds to a TCRBV antigen, and B or D comprises a cytokine inhibitor molecule;
(15) A comprises a first antigen binding domain that selectively binds to a TCRBV antigen, C comprises a second antigen binding domain that selectively binds to a TCRBV antigen, and B or D comprises a death receptor signal engager;
(16) A comprises a first antigen binding domain that selectively binds to a TCRBV antigen, and B, C, or D comprises (a) an immune cell engager, e.g., an NK cell engager, e.g., an anti-NKp30, anti-NKp46, anti-NKG2D, or anti-CD16 antibody molecule, and (b) a cytokine molecule;
(17) A comprises a first antigen binding domain that selectively binds to a TCRBV antigen, and B, C, or D comprises (a) an immune cell engager, e.g., an NK cell engager, e.g., an anti-NKp30, anti-NKp46, anti-NKG2D, or anti-CD16 antibody molecule, and (b) a cytokine inhibitor molecule;
(18) A comprises a first antigen binding domain that selectively binds to a TCRBV antigen, and B, C, or D comprises (a) an immune cell engager, e.g., an NK cell engager, e.g., an anti-NKp30, anti-NKp46, anti-NKG2D, or anti-CD16 antibody molecule, and (b) a death receptor signal engager;
(19) A comprises a first antigen binding domain that selectively binds to a TCRBV antigen, and B, C, or D comprises (a) an immune cell engager, e.g., a T cell engager, e.g., an anti-CD3 antibody molecule, and (b) a cytokine molecule;
(20) A comprises a first antigen binding domain that selectively binds to a TCRBV antigen, and B, C, or D comprises (a) an immune cell engager, e.g., a T cell engager, e.g., an anti-CD3 antibody molecule, and (b) a cytokine inhibitor molecule;
(21) A comprises a first antigen binding domain that selectively binds to a TCRBV antigen, and B, C, or D comprises (a) an immune cell engager, e.g., a T cell engager, e.g., an anti-CD3 antibody molecule, and (b) a death receptor signal engager;
(22) A comprises a first antigen binding domain that selectively binds to a TCRBV antigen, and B, C, or D comprises (a) a cytokine molecule and (b) a death receptor signal engager;
(23) A comprises a first antigen binding domain that selectively binds to a TCRBV antigen, and B, C, or D comprises (a) a cytokine inhibitor molecule and (b) a death receptor signal engager;
(24) A comprises a first antigen binding domain that selectively binds to a TCRBV antigen, B comprises a second antigen binding domain that selectively binds to a TCRBV antigen, and C or D comprises (a) an immune cell engager, e.g., an NK cell engager, e.g., an anti-NKp30, anti-NKp46, anti-NKG2D, or anti-CD16 antibody molecule, and (b) a cytokine molecule;
(25) A comprises a first antigen binding domain that selectively binds to a TCRBV antigen, B comprises a second antigen binding domain that selectively binds to a TCRBV antigen, and C or D comprises (a) an immune cell engager, e.g., an NK cell engager, e.g., an anti-NKp30, anti-NKp46, anti-NKG2D, or anti-CD16 antibody molecule, and (b) a cytokine inhibitor molecule;
(26) A comprises a first antigen binding domain that selectively binds to a TCRBV antigen, B comprises a second antigen binding domain that selectively binds to a TCRBV antigen, and C or D comprises (a) an immune cell engager, e.g., an NK cell engager, e.g., an anti-NKp30, anti-NKp46, anti-NKG2D, or anti-CD16 antibody molecule, and (b) a death receptor signal engager;
(27) A comprises a first antigen binding domain that selectively binds to a TCRBV antigen, B comprises a second antigen binding domain that selectively binds to a TCRBV antigen, and C or D comprises (a) an immune cell engager, e.g., an NK cell engager, e.g., an a anti-NKp30, anti-NKp46, anti-NKG2D, or anti-CD16 antibody molecule, and (b) a stromal modifying moiety;
(28) A comprises a first antigen binding domain that selectively binds to a TCRBV antigen, B comprises a second antigen binding domain that selectively binds to a TCRBV antigen, and C or D comprises (a) an immune cell engager, e.g., a T cell engager, e.g., an anti-CD3 antibody molecule, and (b) a cytokine molecule;
(29) A comprises a first antigen binding domain that selectively binds to a TCRBV antigen, B comprises a second antigen binding domain that selectively binds to a TCRBV antigen, and C or D comprises (a) an immune cell engager, e.g., a T cell engager, e.g., an anti-CD3 antibody molecule, and (b) a cytokine inhibitor molecule;
(30) A comprises a first antigen binding domain that selectively binds to a TCRBV antigen, B comprises a second antigen binding domain that selectively binds to a TCRBV antigen, and C or D comprises (a) an immune cell engager, e.g., a T cell engager, e.g., an anti-CD3 antibody molecule, and (b) a death receptor signal engager;
(31) A comprises a first antigen binding domain that selectively binds to a TCRBV antigen, B comprises a second antigen binding domain that selectively binds to a TCRBV antigen, and C or D comprises (a) a cytokine molecule and (b) a death receptor signal engager;
(32) A comprises a first antigen binding domain that selectively binds to a TCRBV antigen, B comprises a second antigen binding domain that selectively binds to a TCRBV antigen, and C or D comprises (a) a cytokine inhibitor molecule and (b) a death receptor signal engager;
(33) A comprises a first antigen binding domain that selectively binds to a TCRBV antigen, C comprises a second antigen binding domain that selectively binds to a TCRBV antigen, and B or D comprises (a) an immune cell engager, e.g., an NK cell engager, e.g., an anti-NKp30, anti-NKp46, anti-NKG2D, or anti-CD16 antibody molecule, and (b) a cytokine molecule;
(34) A comprises a first antigen binding domain that selectively binds to a TCRBV antigen, C comprises a second antigen binding domain that selectively binds to a TCRBV antigen, and B or D comprises (a) an immune cell engager, e.g., an NK cell engager, e.g., an anti-NKp30, anti-NKp46, anti-NKG2D, or anti-CD16 antibody molecule, and (b) a cytokine inhibitor molecule;
(35) A comprises a first antigen binding domain that selectively binds to a TCRBV antigen, C comprises a second antigen binding domain that selectively binds to a TCRBV antigen, and B or D comprises (a) an immune cell engager, e.g., an NK cell engager, e.g., an anti-NKp30, anti-NKp46, anti-NKG2D, or anti-CD16 antibody molecule, and (b) a death receptor signal engager;
(36) A comprises a first antigen binding domain that selectively binds to a TCRBV antigen, C comprises a second antigen binding domain that selectively binds to a TCRBV antigen, and B or D comprises (a) an immune cell engager, e.g., a T cell engager, e.g., an anti-CD3 antibody molecule, and (b) a cytokine molecule;
(37) A comprises a first antigen binding domain that selectively binds to a TCRBV antigen, C comprises a second antigen binding domain that selectively binds to a TCRBV antigen, and B or D comprises (a) an immune cell engager, e.g., a T cell engager, e.g., an anti-CD3 antibody molecule, and (b) a cytokine inhibitor molecule;
(38) A comprises a first antigen binding domain that selectively binds to a TCRBV antigen, C comprises a second antigen binding domain that selectively binds to a TCRBV antigen, and B or D comprises (a) an immune cell engager, e.g., a T cell engager, e.g., an anti-CD3 antibody molecule, and (b) a death receptor signal engager;
(39) A comprises a first antigen binding domain that selectively binds to a TCRBV antigen, C comprises a second antigen binding domain that selectively binds to a TCRBV antigen, and B or D comprises (a) a cytokine molecule and (b) a death receptor signal engager;
(40) A comprises a first antigen binding domain that selectively binds to a TCRBV antigen, C comprises a second antigen binding domain that selectively binds to a TCRBV antigen, and B or D comprises (a) a cytokine inhibitor molecule and (b) a death receptor signal engager; or

[0321] 280. The multifunctional molecule of embodiment 278 or 279, wherein the dimerization module comprises one or more immunoglobulin chain constant regions (e.g., Fc regions) comprising one or more of: a paired cavity-protuberance (“knob-in-a hole”), an electrostatic interaction, or a strand-exchange.

[0322] 281. The multifunctional molecule of embodiment 280, wherein the one or more immunoglobulin chain constant regions (e.g., Fc regions) comprise an amino acid substitution at a position chosen from one or more of 347, 349, 350, 351, 366, 368, 370, 392, 394, 395, 397, 398, 399, 405, 407, or 409, e.g., of the Fc region of human IgG1, optionally wherein the one or more immunoglobulin chain constant regions (e.g., Fc regions) comprise an amino acid substitution chosen from: T366S, L368A, or Y407V (e.g., corresponding to a cavity or hole), or T366W (e.g., corresponding to a protuberance or knob), or a combination thereof.

[0323] 282. The multifunctional molecule of any one of embodiments 1-281, further comprising a linker, e.g., a linker between one or more of: the antigen binding domain and the immune cell engager, the antigen binding domain and the cytokine molecule, the antigen binding domain and the stromal modifying moiety, the immune cell engager and the cytokine molecule, the immune cell engager and the stromal modifying moiety, the cytokine molecule and the stromal modifying moiety, the antigen binding domain and the dimerization module, the immune cell engager and the dimerization module, the cytokine molecule and the dimerization module, or the stromal modifying moiety and the dimerization module.

[0324] 283. The multifunctional molecule of embodiment 282, wherein the linker is chosen from: a cleavable linker, a non-cleavable linker, a peptide linker, a flexible linker, a rigid linker, a helical linker, or a non-helical linker.

[0325] 284. The multifunctional molecule of embodiment 282 or 283, wherein the linker is a peptide linker.

[0326] 285. The multifunctional molecule of 284, wherein the peptide linker comprises Gly and Ser.

[0327] 286. The multifunctional molecule of 285, wherein the peptide linker comprises an amino acid sequence chosen from SEQ ID NOs: 7248-7251 or 7252-7253 and 77-78.

[0328] 287. A multifunctional molecule, comprising:

(i) a first antigen binding domain that selectively binds to a TCRBV antigen, and
(ii) an NK cell engager, e.g., an anti-NKp30, anti-NKp46, anti-NKG2D, or anti-CD16 antibody molecule.

[0329] 288. The multifunctional molecule of embodiment 287, wherein the NK cell engager comprises an anti-NKp30 antibody molecule.

[0330] 289. The multifunctional molecule of embodiment 287, wherein the NK cell engager comprises an anti-NKp46 antibody molecule.

[0331] 290. A multifunctional molecule, comprising:

(i) a first antigen binding domain that binds to, e.g., selectively binds to, T cell receptor variable beta (TCRBV), e.g., a TCRBV antigen, and
(ii) a death receptor signal engager.

[0332] 291. A multifunctional molecule, comprising:

(i) a first antigen binding domain that binds to, e.g., selectively binds to, T cell receptor variable beta (TCRBV), e.g., a TCRBV antigen, and
(ii) a cytokine inhibitor molecule, e.g., TGF-beta inhibitor.

[0333] 292. The multifunctional molecule of any of embodiments 1-291, wherein the multifunctional molecule binds to the TCRBV antigen monovalently.

[0334] 293. The multifunctional molecule of any one of embodiments 1-291, wherein the multifunctional molecule binds to the TCRBV antigen multivalently, e.g., di-, tri-, tetra-, penta-, hexa-, hepta-, octa-, nona-, or deca-valently.

[0335] 294. The multifunctional molecule of any of embodiments 2-261, wherein the multifunctional molecule binds to the TCRBV antigen on a lymphocyte expressing the TCRBV antigen.

[0336] 295. The multifunctional molecule of any preceding embodiment, wherein the multifunctional molecule binds, e.g., via the immune cell engager, to the immune cell monovalently.

[0337] 296. The multifunctional molecule of any one of embodiments 1-294, wherein the multifunctional molecule binds, e.g., via the immune cell engager, to the immune cell multivalently, e.g., di-, tri-, tetra-, penta-, hexa-, hepta-, octa-, nona-, or deca-valently.

[0338] 297. The multifunctional molecule of any preceding embodiment, further comprising a heavy chain constant region, e.g., an Fc region, that mediates antibody dependent cellular cytotoxicity (ADCC).

[0339] 298. The multifunctional molecule of any preceding embodiment, further comprising a heavy chain constant region, e.g., an Fc region, that mediates complement dependent cytotoxicity (e.g., via C1q).

[0340] 299. A nucleic acid molecule encoding the multifunctional molecule of any one of embodiments 1-298.

[0341] 300. A vector, e.g., an expression vector, comprising the nucleic acid molecules of embodiment 299.

[0342] 301. A host cell comprising the nucleic acid molecule of embodiment 299 or the vector of embodiment 300.

[0343] 302. A method of making, e.g., producing, the multifunctional molecule or antibody molecule of any one of embodiments 1-298, comprising culturing the host cell of embodiment 301, under suitable conditions, e.g., conditions suitable for gene expression and/or homo- or heterodimerization.

[0344] 303. A pharmaceutical composition comprising the multifunctional molecule of any one of embodiments 1-298 and a pharmaceutically acceptable carrier, excipient, or stabilizer.

[0345] 304. A method of treating a TCR bias, comprising administering to a subject in need thereof the multifunctional molecule of any one of embodiments 1-298, wherein the multifunctional molecule is administered in an amount effective to treat the TCR bias.

[0346] 305. A method of treating an autoimmune disease (e.g., an autoimmune disease associated with a TCR bias), comprising administering to a subject in need thereof the multifunctional molecule of any one of embodiments 1-298, wherein the multifunctional molecule is administered in an amount effective to treat the autoimmune disease.

[0347] 306. The method of either of embodiments 304 or 305, further comprising identifying, evaluating, or selecting a subject in need of treatment, wherein identifying, evaluating, or selecting comprises determining (e.g., directly determining or indirectly determining, e.g., obtaining information regarding) whether a subject has a TCR bias or an autoimmune disease (e.g., an autoimmune disease associated with a TCR bias).

[0348] 307. The method of embodiment 306, further comprising, responsive to determining that a subject has a TCR bias or an autoimmune disease (e.g., an autoimmune disease associated with a TCR bias):

optionally, selecting the subject for treatment with a multifunctional molecule comprising an antigen binding domain that binds to a TCRBV antigen (e.g., a TCRBV antigen corresponding to the biased TCRBV clonotype), and
administering a multifunctional molecule comprising an antigen binding domain that binds to a TCRBV antigen (e.g., a TCRBV antigen corresponding to the biased TCRBV clonotype).

[0349] 308. A method of treating a TCR bias, comprising:

responsive to determining that a subject has a TCR bias, administering to a subject in need thereof the multifunctional molecule of any one of claims 1-298, wherein the multifunctional molecule is administered in an amount effective to treat the TCR bias.

[0350] 309. A method of treating an autoimmune disease (e.g., an autoimmune disease associated with a TCR bias), comprising:

responsive to determining that a subject has an autoimmune disease (e.g., an autoimmune disease associated with a TCR bias), administering to a subject in need thereof the multifunctional molecule of any one of claims 1-298, wherein the multifunctional molecule is administered in an amount effective to treat the autoimmune disease (e.g., an autoimmune disease associated with a TCR bias).

[0351] 310. The method of any of embodiments 304-309, wherein the subject has a TCR bias (e.g., a biased TCRBV clonotype) and/or an autoimmune disease associated with said bias.

[0352] 311. A method of identifying a subject in need of treatment for cancer using a multifunctional molecule of any of embodiments 1-298, comprising determining (e.g., directly determining or indirectly determining, e.g., obtaining information regarding) whether a subject has a TCR bias (e.g., a biased TCRBV clonotype) and/or an autoimmune disease associated with said bias, wherein:

responsive to determining that the subject has a TCR bias (e.g., a biased TCRBV clonotype) and/or an autoimmune disease associated with said bias, identifying the subject as a candidate for treatment using a multifunctional molecule comprising an antigen binding domain that binds to the TCRBV antigen, and optionally not as a candidate for treatment using a multifunctional molecule comprising an antigen binding domain that does not bind to the TCRBV antigen (e.g., that binds to a different TCRBV antigen).

[0353] 312. The method of embodiment 311, further comprising:

responsive to identifying the subject as a candidate for treatment using a multifunctional molecule comprising an antigen binding domain that binds to the TCRBV antigen, treating the subject with (e.g., administering to the subject) a multifunctional molecule comprising an antigen binding domain that binds to the TCRBV antigen.

[0354] 313. A method of evaluating a subject in need of treatment for a TCR bias (e.g., a biased TCRBV clonotype) and/or an autoimmune disease associated with said bias, comprising determining (e.g., directly determining or indirectly determining, e.g., obtaining information regarding) whether a subject has a TCR bias.

[0355] 314. The method of embodiment 313, further comprising responsive to the evaluation, treating the subject with (e.g., administering to the subject) a multifunctional molecule comprising an antigen binding domain that binds to the TCRBV antigen.

[0356] 315. The method of any one of embodiments 304-314, wherein the TCR bias is associated with an autoimmune disease.

[0357] 316. The method of embodiment 315, wherein the autoimmune disease is selected from Churg-Strauss syndrome, sarcoidosis, systemic lupus erythematosus (SLE), type 1 diabetes, autoimmune hepatitis (e.g., type 1 or type 2), primary sclerosing cholangitis, primary biliary cirrhosis, multiple sclerosis, Guillain-Barre syndrome and the AMAN (axonal & neuronal neuropathy), chronic inflammatory demyelinating polyneuropathy (CIDP), transverse myelitis, Tolosa-Hunt syndrome (THS), Devic's disease (neuromyelitis optica), paraneoplastic cerebellar degeneration (PCD), Lambert-Eaton syndrome, psoriasis, scleroderma, CREST (calcinosis, Raynaud phenomenon, esophageal dysmotility, sclerodactyly, and telangiectasia) syndrome, dermatitis herpetiformis, dermatomyositis, bullous pemphigoid, cicatricial pemphigoid/benign mucosal pemphigoid, pemphigoid gestationis, rheumatoid arthritis (RA), psoriatic arthritis, relapsing polychondritis, chronic recurrent multifocal osteomyelitis (CRMO), vasculitis, Kawasaki disease, granulomatosis with polyangiitis (GPA), Behcet's disease (vasculitis), Takayasu's arteritis, polyarteritis nodosa, microscopic polyangiitis (MPA), leukocytoclastic vasculitis, Cogan's syndrome, uveitis, peripheral uveitis (Pars planitis), scleritis, autoimmune inner ear disease (AIED), Crohn's, ulcerative colitis (UC), Dressler's syndrome, Rheumatic fever, Evans syndrome, paroxysmal nocturnal hemoglobinuria (PNH), hemolytic anemia, thrombocytopenic purpura (TTP), polymyositis, juvenile myositis (JM), including Juvenile Dermatomyositis (JDM) and Juvenile Polymyositis (JPM), Sjogren's syndrome, ocular cicatricial pemphigoid, or Hashimoto's thyroiditis.

[0358] 317. The method of any of embodiments 304-316, further comprising administering a second therapeutic treatment.

[0359] 318. The method of embodiment 317, wherein the second therapeutic treatment comprises a therapeutic agent (e.g., a chemotherapeutic agent, a biologic agent, hormonal therapy), radiation, or surgery.

[0360] 319. A method of treating an autoimmune disease (e.g., an autoimmune disease associated with a TCR bias), in a subject in need thereof, comprising administering to said subject an effective amount, e.g., a therapeutically effective amount, of an antibody molecule which binds (e.g., specifically binds) to a T cell receptor beta variable region (TCRβV) (“anti-TCRβV antibody molecule”), thereby treating the disorder.

[0361] 320. A method of depleting a population of T cells in a subject having an autoimmune disorder (e.g., an autoimmune disease associated with a TCR bias), comprising, contacting the T cell population with an effective amount of an antibody molecule which binds (e.g., specifically binds) to a T cell receptor beta variable region (TCRβV) (“anti-TCRβV antibody molecule”).

[0362] 321. The method of claim 320, wherein the contacting occurs in vivo or in vitro.

[0363] 322. The method of any one of claims 319-321, wherein the anti-TCRβV antibody molecule:

(i) is not an antibody molecule disclosed in U.S. Pat. No. 5,861,155;
(ii) binds to TCRβ V12 with an affinity and/or binding specificity that is less than (e.g., less than about 10%, 20%, 30%, 40%, 50%, 60%, 70%, 80%, 90% or about 2-, 5-, or 10-fold) the affinity and/or binding specificity of the 16G8 murine antibody or a humanized version thereof as described in U.S. Pat. No. 5,861,155;
(iii) binds to TCRβ V12 with an affinity and/or binding specificity that is greater than (e.g., greater than about 10%, 20%, 30%, 40%, 50%, 60%, 70%, 80%, 90% or about 2-, 5-, or 10-fold) the affinity and/or binding specificity of the 16G8 murine antibody or a humanized version thereof as described in U.S. Pat. No. 5,861,155;
(iii) binds to TCRβ V5-5*01 or TCRβ V5-1*01 with an affinity and/or binding specificity that is greater than (e.g., greater than about 10%, 20%, 30%, 40%, 50%, 60%, 70%, 80%, 90% or about 2-, 5-, or 10-fold) the affinity and/or binding specificity of the TM23 murine antibody or a humanized version thereof as described in U.S. Pat. No. 5,861,155 or
(iv) binds to TCRβ V5-5*01 or TCRβ V5-1*01 with an affinity and/or binding specificity that is greater than (e.g., greater than about 10%, 20%, 30%, 40%, 50%, 60%, 70%, 80%, 90% or about 2-, 5-, or 10-fold) the affinity and/or binding specificity of the TM23 murine antibody or a humanized version thereof as described in U.S. Pat. No. 5,861,155.

[0364] 323. The method of any one of claims 319-322, wherein the anti-TCRβV antibody molecule comprises an Fc region, e.g., an Fc region having effector function, e.g., antibody dependent cell-mediated cytotoxicity (ADCC), Antibody-dependent cellular phagocytosis (ADCP) and/or complement dependent cytotoxicity (CDC).

[0365] 324. The method of any claim 323, wherein the anti-TCRβV antibody molecule comprises an Fc region with enhanced effector function, e.g., as compared to a wildtype Fc region.

[0366] 325. The method of any one of claims 319-324, wherein the anti-TCRβV antibody molecule comprises a human IgG1 region or a human IgG4 region.

[0367] 326. The method of any one of claim 319 or 321-325, wherein the autoimmune disease is selected from Churg-Strauss syndrome, sarcoidosis, systemic lupus erythematosus (SLE), type 1 diabetes, autoimmune hepatitis (e.g., type 1 or type 2), primary sclerosing cholangitis, primary biliary cirrhosis, multiple sclerosis, Guillain-Barre syndrome and the AMAN (axonal & neuronal neuropathy), chronic inflammatory demyelinating polyneuropathy (CIDP), transverse myelitis, Tolosa-Hunt syndrome (THS), Devic's disease (neuromyelitis optica), paraneoplastic cerebellar degeneration (PCD), Lambert-Eaton syndrome, psoriasis, scleroderma, CREST (calcinosis, Raynaud phenomenon, esophageal dysmotility, sclerodactyly, and telangiectasia) syndrome, dermatitis herpetiformis, dermatomyositis, bullous pemphigoid, cicatricial pemphigoid/benign mucosal pemphigoid, pemphigoid gestationis, rheumatoid arthritis (RA), psoriatic arthritis, relapsing polychondritis, chronic recurrent multifocal osteomyelitis (CRMO), vasculitis, Kawasaki disease, granulomatosis with polyangiitis (GPA), Behcet's disease (vasculitis), Takayasu's arteritis, polyarteritis nodosa, microscopic polyangiitis (MPA), leukocytoclastic vasculitis, Cogan's syndrome, uveitis, peripheral uveitis (Pars planitis), scleritis, autoimmune inner ear disease (AIED), Crohn's, ulcerative colitis (UC), Dressler's syndrome, Rheumatic fever, Evans syndrome, paroxysmal nocturnal hemoglobinuria (PNH), hemolytic anemia, thrombocytopenic purpura (TTP), polymyositis, juvenile myositis (JM), including Juvenile Dermatomyositis (JDM) and Juvenile Polymyositis (JPM), Sjogren's syndrome, ocular cicatricial pemphigoid, or Hashimoto's thyroiditis.

[0368] 327. The method of any one of claims 319-326, wherein the anti-TCRβV antibody molecule comprises an antigen binding domain comprising one or more (e.g., all three) of a LC CDR1, LC CDR2, and LC CDR3 provided in Tables 1A, 2A, 10A, 11A, 12A or 13A; and/or one or more (e.g., all three) of a HC CDR1, HC CDR2, and HC CDR3 provided in Tables 1A, 2A, 10A, 11A, 12A or 13A, or a sequence with at least 85%, 90%, 95%, 96%, 97%, 98%, or 99% identity thereto.

[0369] 328. The method of any one of claims 319-327, wherein the anti-TCRβV antibody molecule comprises a variable heavy chain (VH) and/or a variable light chain (VL) provided in Tables 1A, 2A, 10A, 11A, 12A or 13A, or a sequence with at least 85%, 90%, 95%, 96%, 97%, 98%, or 99% identity thereto.

[0370] Unless otherwise defined, all technical and scientific terms used herein have the same meaning as commonly understood by one of ordinary skill in the art to which this invention belongs. Although methods and materials similar or equivalent to those described herein can be used in the practice or testing of the present invention, suitable methods and materials are described below. All publications, patent applications, patents, and other references mentioned herein are incorporated by reference in their entirety. In the case of conflict, the present specification, including definitions, will control. In addition, the materials, methods, and examples are illustrative only and are not intended to be limiting.

[0371] Other features and advantages of the invention will be apparent from the following detailed description and claims.

### BRIEF DESCRIPTION OF THE DRAWINGS

[0372] FIGS. 1A-1B shows the alignment of the Antibody A source mouse VH and VL framework 1, CDR 1, framework 2, CDR 2, framework 3, CDR3, and framework 4 regions with their respective humanized sequences. Kabat CDRs are shown in bold, Chothia CDRs are shown in italics, and combined CDRs are shown in boxes. The framework positions that were back mutated are double underlined. FIG. 1A shows VH sequences for murine Antibody A (SEQ ID NO: 1) and humanized Antibody A-H (SEQ ID NO: 9). FIG. 1B shows VL sequences for murine Antibody A (SEQ ID NO: 2) and humanized Antibody A-H (SEQ ID NO: 10 and SEQ ID NO: 11).

[0373] FIGS. 2A-2B shows the alignment of the Antibody B source mouse VH and VL framework 1, CDR 1, framework 2, CDR 2, framework 3, CDR3, and framework 4 regions with their respective humanized sequences. Kabat CDRs are shown in bold, Chothia CDRs are shown in italics, and combined CDRs are shown in boxes. The framework positions that were back mutated are double underlined. FIG. 2A shows the VH sequence for murine Antibody B (SEQ ID NO: 15) and humanized VH sequences B-H.1A to B-H.1C (SEQ ID NOs: 23-25). FIG. 2B shows the VL sequence for murine Antibody B (SEQ ID NO: 16) and humanized VL sequences B-H.1D to B-H.1H (SEQ ID NOs: 26-30).

[0374] FIG. 3 depicts the phylogenetic tree of TCRBV gene family and subfamilies with corresponding antibodies mapped. Subfamily identities are as follows: Subfamily A: TCRβ V6; Subfamily B: TCRβ V10; Subfamily C: TCRβ V12; Subfamily D: TCRβ V5; Subfamily E: TCRβ V7; Subfamily F: TCRβ V11; Subfamily G: TCRβ V14; Subfamily H: TCRβ V16; Subfamily I:TCRβ V18; Subfamily J:TCRβ V9; Subfamily K: TCRβ V13; Subfamily L: TCRβ V4; Subfamily M:TCRβ V3; Subfamily N:TCRβ V2; Subfamily O:TCRβ V15; Subfamily P: TCRβ V30; Subfamily Q: TCRβ V19; Subfamily R:TCRβ V27; Subfamily S:TCRβ V28; Subfamily T: TCRβ V24; Subfamily U: TCRβ V20; Subfamily V: TCRβ V25; and Subfamily W:TCRβ V29 subfamily. Subfamily members are described in detail herein in the Section titled “TCR beta V (TCRβV)”.

[0375] FIG. 4 is a graph showing binding of NKp30 antibodies to NK92 cells. Data was calculated as the percent-AF747 positive population.

[0376] FIG. 5 is a graph showing activation of NK92 cells by NKp30 antibodies. Data were generated using hamster anti-NKp30 mAbs.

[0377] FIGS. 6A and 6B are schematics showing the alignment of affinity matured humanized Antibody A-H sequences. FIG. 6A shows the alignment of affinity matured humanized Antibody A-H VL sequences (SEQ ID NOs: 3377-3389, respectively, in order of appearance). FIG. 6B shows the alignment of affinity matured humanized Antibody A-H VH sequences (SEQ ID NOs: 3390-3436, respectively, in order of appearance).

### DETAILED DESCRIPTION OF THE INVENTION

[0378] Disclosed herein are multifunctional molecules (also referred to herein as “multispecific molecules”) that include a plurality of (e.g., two or more) functionalities (or binding specificities), comprising (i) an antigen binding domain that binds to, e.g., selectively binds to, T cell receptor variable beta (TCRBV), e.g., a TCRBV antigen, and (ii) one, two, or all of: (a) an immune cell engager chosen from a T cell engager, an NK cell engager (e.g., a molecule that binds to NKp30, NKp46, NKG2D, or CD16), a B cell engager, a dendritic cell engager, or a macrophage cell engager; (b) a cytokine molecule or cytokine inhibitor molecule; and (c) a death receptor signal engager. In some embodiments, the antigen binding domain comprises a sequence or part of a sequence found in Tables 13 or 14. In some embodiments, the immune cell engager comprises an NK cell engager comprising a sequence or part of a sequence found in Tables 7-10. In some embodiments, the antigen binding domain comprises a sequence or part of a sequence found in Tables 13 or 14 and the immune cell engager comprises an NK cell engager comprising a sequence or part of a sequence found in Tables 7-10.

[0379] In an embodiment, the multispecific or multifunctional molecule is a bispecific (or bifunctional) molecule, a trispecific (or trifunctional) molecule, or a tetraspecific (or tetrafunctional) molecule.

[0380] In some embodiments, the multifunctional molecule comprises an antigen binding domain that binds a TCRBV antigen on the surface of a lymphocyte, e.g., T cell. In some embodiments, the TCRBV antigen corresponds to a biased TCRBV clonotype, e.g., TCRs comprising the TCRBV antigen may be over-represented in the TCR repertoire or lymphocyte (e.g., T cell) pool of a subject (e.g., subjects with autoimmune disease associated with TCR bias), or expressed at a level that is higher than the level in other subjects (e.g., non-autoimmune disease subjects).

[0381] Without being bound by theory, the multispecific or multifunctional molecules disclosed herein are expected to localize (e.g., bridge) and/or activate an immune cell (e.g., an immune effector cell chosen from a T cell, an NK cell, a B cell, a dendritic cell or a macrophage), in the presence of a cell (e.g., a lymphocyte, e.g., T cell) expressing the TCRBV antigen (e.g., a TCRBV antigen corresponding to a biased TCRBV clonotype), e.g., on the cell surface. Increasing the proximity and/or activity of the immune cell, in the presence of the cell (e.g., a lymphocyte, e.g., T cell) expressing the TCRBV antigen (e.g., a TCRBV antigen corresponding to a biased TCRBV clonotype) using the multispecific or multifunctional molecules described herein is expected to enhance an immune response against the target cell, thereby providing a more effective therapy (e.g., by decreasing the level of the biased TCR and/or T cell expressing the biased TCR). In another embodiment, targeting a cell (e.g., a lymphocyte, e.g., T cell) expressing the TCRBV antigen (e.g., a TCRBV antigen corresponding to a biased TCRBV clonotype) with a multifunctional molecule also comprising a cell death inducing moiety (e.g., a death receptor signal engager) is thought to promote the death of the target cell (e.g., by decreasing the level of the biased TCR and/or T cell expressing the biased TCR).

[0382] Without being bound by theory, by utilizing, in some embodiments, a multispecific or multifunctional molecule specific for a particular TCRBV antigen (e.g., a TCRBV antigen corresponding to a biased TCRBV clonotype), but not with specificity for other or all types of T cell receptors, it is expected that the deleterious effects of increasing the proximity or activity of immune cells toward T cells generally or promoting cell death in T cells generally may be mitigated. In this way, it is thought that use of the multispecific or multifunctional molecules disclosed herein may increase the proximity or activity of immune cells toward cells comprising TCRBV antigen corresponding to a biased TCRBV clonotype without necessarily increasing proximity or activity of immune cells toward T cells generally, or promote cell death in cells comprising TCRBV antigen corresponding to a biased TCRBV clonotype without necessarily increasing cell death in T cells generally.

[0383] Accordingly, provided herein are, inter alia, multispecific or multifunctional molecules (e.g., multispecific or multifunctional antibody molecules) that include the aforesaid moieties, nucleic acids encoding the same, methods of producing the aforesaid molecules, and methods of treating a disease or disorder, e.g., an autoimmune disease or a TCR bias, using the aforesaid molecules.

### Definitions

[0384] In some embodiments, the multifunctional molecule includes an immune cell engager. “An immune cell engager” refers to one or more binding specificities that bind and/or activate an immune cell, e.g., a cell involved in an immune response. In embodiments, the immune cell is chosen from a T cell, an NK cell, a B cell, a dendritic cell, and/or the macrophage cell. The immune cell engager can be an antibody molecule, a receptor molecule (e.g., a full length receptor, receptor fragment, or fusion thereof (e.g., a receptor-Fc fusion)), or a ligand molecule (e.g., a full length ligand, ligand fragment, or fusion thereof (e.g., a ligand-Fc fusion)) that binds to the immune cell antigen (e.g., the T cell, the NK cell antigen, the B cell antigen, the dendritic cell antigen, and/or the macrophage cell antigen). In embodiments, the immune cell engager specifically binds to the target immune cell, e.g., binds preferentially to the target immune cell. For example, when the immune cell engager is an antibody molecule, it binds to an immune cell antigen (e.g., a T cell antigen, an NK cell antigen, a B cell antigen, a dendritic cell antigen, and/or a macrophage cell antigen) with a dissociation constant of less than about 10 nM.

[0385] In some embodiments, the multifunctional molecule includes a cytokine molecule. As used herein, a “cytokine molecule” refers to full length, a fragment or a variant of a cytokine; a cytokine further comprising a receptor domain, e.g., a cytokine receptor dimerizing domain; or an agonist of a cytokine receptor, e.g., an antibody molecule (e.g., an agonistic antibody) to a cytokine receptor, that elicits at least one activity of a naturally-occurring cytokine. In some embodiments the cytokine molecule is chosen from interleukin-2 (IL-2), interleukin-7 (IL-7), interleukin-12 (IL-12), interleukin-15 (IL-15), interleukin-18 (IL-18), interleukin-21 (IL-21), or interferon gamma, or a fragment or variant thereof, or a combination of any of the aforesaid cytokines. The cytokine molecule can be a monomer or a dimer. In embodiments, the cytokine molecule can further include a cytokine receptor dimerizing domain. In other embodiments, the cytokine molecule is an agonist of a cytokine receptor, e.g., an antibody molecule (e.g., an agonistic antibody) to a cytokine receptor chosen from an IL-15Ra or IL-21R.

[0386] As used herein, the term “molecule” as used in, e.g., antibody molecule, cytokine molecule, receptor molecule, includes full-length, naturally-occurring molecules, as well as variants, e.g., functional variants (e.g., truncations, fragments, mutated (e.g., substantially similar sequences) or derivatized form thereof), so long as at least one function and/or activity of the unmodified (e.g., naturally-occurring) molecule remains.

[0387] As used herein, the term “autoimmune” disease, disorder, or condition refers to a disease where the body's immune system attacks its own cells or tissues. An autoimmune disease can results in the production of autoantibodies that are inappropriately produced and/or excessively produced to a self-antigen or autoantigen. Autoimmune diseases include, but are not limited to, cardiovascular diseases, rheumatoid diseases, glandular diseases, gastrointestinal diseases, cutaneous diseases, hepatic diseases, neurological diseases, muscular diseases, nephric diseases, diseases related to reproduction, connective tissue diseases and systemic diseases. In some embodiments, the autoimmune disease is mediated by T cells, B cells, innate immune cells (e.g., macrophages, eosinophils, or natural killer cells), or complement-mediated pathways.

[0388] Certain terms are defined below.

[0389] As used herein, the articles “a” and “an” refer to one or more than one, e.g., to at least one, of the grammatical object of the article. The use of the words “a” or “an” when used in conjunction with the term “comprising” herein may mean “one,” but it is also consistent with the meaning of “one or more,” “at least one,” and “one or more than one.”

[0390] As used herein, “about” and “approximately” generally mean an acceptable degree of error for the quantity measured given the nature or precision of the measurements. Exemplary degrees of error are within 20 percent (%), typically, within 10%, and more typically, within 5% of a given range of values.

[0391] “Antibody molecule” as used herein refers to a protein, e.g., an immunoglobulin chain or fragment thereof, comprising at least one immunoglobulin variable domain sequence. An antibody molecule encompasses antibodies (e.g., full-length antibodies) and antibody fragments. In an embodiment, an antibody molecule comprises an antigen binding or functional fragment of a full-length antibody, or a full length immunoglobulin chain. For example, a full-length antibody is an immunoglobulin (Ig) molecule (e.g., an IgG antibody) that is naturally occurring or formed by normal immunoglobulin gene fragment recombinatorial processes). In embodiments, an antibody molecule refers to an immunologically active, antigen-binding portion of an immunoglobulin molecule, such as an antibody fragment. An antibody fragment, e.g., functional fragment, is a portion of an antibody, e.g., Fab, Fab′, F(ab′)2, F(ab)₂, variable fragment (Fv), domain antibody (dAb), or single chain variable fragment (scFv). A functional antibody fragment binds to the same antigen as that recognized by the intact (e.g., full-length) antibody. The terms “antibody fragment” or “functional fragment” also include isolated fragments consisting of the variable regions, such as the “Fv” fragments consisting of the variable regions of the heavy and light chains or recombinant single chain polypeptide molecules in which light and heavy variable regions are connected by a peptide linker (“scFv proteins”). In some embodiments, an antibody fragment does not include portions of antibodies without antigen binding activity, such as Fc fragments or single amino acid residues. Exemplary antibody molecules include full length antibodies and antibody fragments, e.g., dAb (domain antibody), single chain, Fab, Fab′, and F(ab′)2 fragments, and single chain variable fragments (scFvs).

[0392] As used herein, an “immunoglobulin variable domain sequence” refers to an amino acid sequence which can form the structure of an immunoglobulin variable domain. For example, the sequence may include all or part of the amino acid sequence of a naturally-occurring variable domain. For example, the sequence may or may not include one, two, or more N- or C-terminal amino acids, or may include other alterations that are compatible with formation of the protein structure.

[0393] In embodiments, an antibody molecule is monospecific, e.g., it comprises binding specificity for a single epitope. In some embodiments, an antibody molecule is multispecific, e.g., it comprises a plurality of immunoglobulin variable domain sequences, where a first immunoglobulin variable domain sequence has binding specificity for a first epitope and a second immunoglobulin variable domain sequence has binding specificity for a second epitope. In some embodiments, an antibody molecule is a bispecific antibody molecule. “Bispecific antibody molecule” as used herein refers to an antibody molecule that has specificity for more than one (e.g., two, three, four, or more) epitope and/or antigen.

[0394] “Antigen” (Ag) as used herein refers to a molecule that can provoke an immune response, e.g., involving activation of certain immune cells and/or antibody generation. Any macromolecule, including almost all proteins or peptides, can be an antigen. Antigens can also be derived from genomic recombinant or DNA. For example, any DNA comprising a nucleotide sequence or a partial nucleotide sequence that encodes a protein capable of eliciting an immune response encodes an “antigen.” In embodiments, an antigen does not need to be encoded solely by a full-length nucleotide sequence of a gene, nor does an antigen need to be encoded by a gene at all. In embodiments, an antigen can be synthesized or can be derived from a biological sample, e.g., a tissue sample, a blood sample, a cell, or a fluid with other biological components. As used, herein a “TCRBV antigen” includes any TCR variable beta chain or portion thereof that can provoke an immune response or be targeted by an antigen binding domain. In some embodiments, biased TCR clonotypes can be characterized by one or more TCRBV antigens which most, e.g., all, of the cells comprising the clonotype exhibit, e.g., on their surface.

[0395] The “antigen-binding site,” or “binding portion” of an antibody molecule refers to the part of an antibody molecule, e.g., an immunoglobulin (Ig) molecule, that participates in antigen binding. In embodiments, the antigen binding site is formed by amino acid residues of the variable (V) regions of the heavy (H) and light (L) chains. Three highly divergent stretches within the variable regions of the heavy and light chains, referred to as hypervariable regions, are disposed between more conserved flanking stretches called “framework regions,” (FRs). FRs are amino acid sequences that are naturally found between, and adjacent to, hypervariable regions in immunoglobulins. In embodiments, in an antibody molecule, the three hypervariable regions of a light chain and the three hypervariable regions of a heavy chain are disposed relative to each other in three dimensional space to form an antigen-binding surface, which is complementary to the three-dimensional surface of a bound antigen. The three hypervariable regions of each of the heavy and light chains are referred to as “complementarity-determining regions,” or “CDRs.” The framework region and CDRs have been defined and described, e.g., in Kabat, E. A., et al. (1991) Sequences of Proteins of Immunological Interest, Fifth Edition, U.S. Department of Health and Human Services, NIH Publication No. 91-3242, and Chothia, C. et al. (1987) J. Mol. Biol. 196:901-917. Each variable chain (e.g., variable heavy chain and variable light chain) is typically made up of three CDRs and four FRs, arranged from amino-terminus to carboxy-terminus in the amino acid order: FR1, CDR1, FR2, CDR2, FR3, CDR3, and FR4.

[0396] As used herein, an “immune cell” refers to any of various cells that function in the immune system, e.g., to protect against agents of infection and foreign matter. In embodiments, this term includes leukocytes, e.g., neutrophils, eosinophils, basophils, lymphocytes, and monocytes. Innate leukocytes include phagocytes (e.g., macrophages, neutrophils, and dendritic cells), mast cells, eosinophils, basophils, and natural killer cells. Innate leukocytes identify and eliminate pathogens, either by attacking larger pathogens through contact or by engulfing and then killing microorganisms, and are mediators in the activation of an adaptive immune response. The cells of the adaptive immune system are special types of leukocytes, called lymphocytes. B cells and T cells are important types of lymphocytes and are derived from hematopoietic stem cells in the bone marrow. B cells are involved in the humoral immune response, whereas T cells are involved in cell-mediated immune response. The term “immune cell” includes immune effector cells.

[0397] “Immune effector cell,” as that term is used herein, refers to a cell that is involved in an immune response, e.g., in the promotion of an immune effector response. Examples of immune effector cells include, but are not limited to, T cells, e.g., alpha/beta T cells and gamma/delta T cells, B cells, natural killer (NK) cells, natural killer T (NK T) cells, and mast cells.

[0398] The term “effector function” or “effector response” refers to a specialized function of a cell. Effector function of a T cell, for example, may be cytolytic activity or helper activity including the secretion of cytokines.

[0399] The compositions and methods of the present invention encompass polypeptides and nucleic acids having the sequences specified, or sequences substantially identical or similar thereto, e.g., sequences at least 80%, 85%, 90%, 95% identical or higher to the sequence specified. In the context of an amino acid sequence, the term “substantially identical” is used herein to refer to a first amino acid that contains a sufficient or minimum number of amino acid residues that are i) identical to, or ii) conservative substitutions of aligned amino acid residues in a second amino acid sequence such that the first and second amino acid sequences can have a common structural domain and/or common functional activity. For example, amino acid sequences that contain a common structural domain having at least about 80%, 85%, 90%. 91%, 92%, 93%, 94%, 95%, 96%, 97%, 98% or 99% identity to a reference sequence, e.g., a sequence provided herein.

[0400] In the context of nucleotide sequence, the term “substantially identical” is used herein to refer to a first nucleic acid sequence that contains a sufficient or minimum number of nucleotides that are identical to aligned nucleotides in a second nucleic acid sequence such that the first and second nucleotide sequences encode a polypeptide having common functional activity, or encode a common structural polypeptide domain or a common functional polypeptide activity. For example, nucleotide sequences having at least about 80%, 85%, 90%, 91%, 92%, 93%, 94%, 95%, 96%, 97%, 98% or 99% identity to a reference sequence, e.g., a sequence provided herein.

[0401] The term “variant” refers to a polypeptide that has a substantially identical amino acid sequence to a reference amino acid sequence, or is encoded by a substantially identical nucleotide sequence. In some embodiments, the variant is a functional variant.

[0402] The term “functional variant” refers to a polypeptide that has a substantially identical amino acid sequence to a reference amino acid sequence, or is encoded by a substantially identical nucleotide sequence, and is capable of having one or more activities of the reference amino acid sequence.

[0403] Calculations of homology or sequence identity between sequences (the terms are used interchangeably herein) are performed as follows.

[0404] To determine the percent identity of two amino acid sequences, or of two nucleic acid sequences, the sequences are aligned for optimal comparison purposes (e.g., gaps can be introduced in one or both of a first and a second amino acid or nucleic acid sequence for optimal alignment and non-homologous sequences can be disregarded for comparison purposes). In a preferred embodiment, the length of a reference sequence aligned for comparison purposes is at least 30%, preferably at least 40%, more preferably at least 50%, 60%, and even more preferably at least 70%, 80%, 90%, 100% of the length of the reference sequence. The amino acid residues or nucleotides at corresponding amino acid positions or nucleotide positions are then compared. When a position in the first sequence is occupied by the same amino acid residue or nucleotide as the corresponding position in the second sequence, then the molecules are identical at that position (as used herein amino acid or nucleic acid “identity” is equivalent to amino acid or nucleic acid “homology”).

[0405] The percent identity between the two sequences is a function of the number of identical positions shared by the sequences, taking into account the number of gaps, and the length of each gap, which need to be introduced for optimal alignment of the two sequences.

[0406] The comparison of sequences and determination of percent identity between two sequences can be accomplished using a mathematical algorithm. In a preferred embodiment, the percent identity between two amino acid sequences is determined using the Needleman and Wunsch ((1970) J. Mol. Biol. 48:444-453) algorithm which has been incorporated into the GAP program in the GCG software package (available at http://www.gcg.com), using either a Blossum 62 matrix or a PAM250 matrix, and a gap weight of 16, 14, 12, 10, 8, 6, or 4 and a length weight of 1, 2, 3, 4, 5, or 6. In yet another preferred embodiment, the percent identity between two nucleotide sequences is determined using the GAP program in the GCG software package (available at http://www.gcg.com), using a NWSgapdna.CMP matrix and a gap weight of 40, 50, 60, 70, or 80 and a length weight of 1, 2, 3, 4, 5, or 6. A particularly preferred set of parameters (and the one that should be used unless otherwise specified) are a Blossum 62 scoring matrix with a gap penalty of 12, a gap extend penalty of 4, and a frameshift gap penalty of 5.

[0407] The percent identity between two amino acid or nucleotide sequences can be determined using the algorithm of E. Meyers and W. Miller ((1989) CABIOS, 4:11-17) which has been incorporated into the ALIGN program (version 2.0), using a PAM120 weight residue table, a gap length penalty of 12 and a gap penalty of 4.

[0408] The nucleic acid and protein sequences described herein can be used as a “query sequence” to perform a search against public databases to, for example, identify other family members or related sequences. Such searches can be performed using the NBLAST and XBLAST programs (version 2.0) of Altschul, et al. (1990) J. Mol. Biol. 215:403-10. BLAST nucleotide searches can be performed with the NBLAST program, score=100, wordlength=12 to obtain nucleotide sequences homologous to a nucleic acid molecule of the invention. BLAST protein searches can be performed with the XBLAST program, score=50, wordlength=3 to obtain amino acid sequences homologous to protein molecules of the invention. To obtain gapped alignments for comparison purposes, Gapped BLAST can be utilized as described in Altschul et al., (1997) Nucleic Acids Res. 25:3389-3402. When utilizing BLAST and Gapped BLAST programs, the default parameters of the respective programs (e.g., XBLAST and NBLAST) can be used. See http://www.ncbi.nlm.nih.gov.

[0409] It is understood that the molecules of the present invention may have additional conservative or non-essential amino acid substitutions, which do not have a substantial effect on their functions.

[0410] The term “amino acid” is intended to embrace all molecules, whether natural or synthetic, which include both an amino functionality and an acid functionality and capable of being included in a polymer of naturally-occurring amino acids. Exemplary amino acids include naturally-occurring amino acids; analogs, derivatives and congeners thereof; amino acid analogs having variant side chains; and all stereoisomers of any of any of the foregoing. As used herein the term “amino acid” includes both the D- or L-optical isomers and peptidomimetics.

[0411] A “conservative amino acid substitution” is one in which the amino acid residue is replaced with an amino acid residue having a similar side chain. Families of amino acid residues having similar side chains have been defined in the art. These families include amino acids with basic side chains (e.g., lysine, arginine, histidine), acidic side chains (e.g., aspartic acid, glutamic acid), uncharged polar side chains (e.g., glycine, asparagine, glutamine, serine, threonine, tyrosine, cysteine), nonpolar side chains (e.g., alanine, valine, leucine, isoleucine, proline, phenylalanine, methionine, tryptophan), beta-branched side chains (e.g., threonine, valine, isoleucine) and aromatic side chains (e.g., tyrosine, phenylalanine, tryptophan, histidine).

[0412] The terms “polypeptide”, “peptide” and “protein” (if single chain) are used interchangeably herein to refer to polymers of amino acids of any length. The polymer may be linear or branched, it may comprise modified amino acids, and it may be interrupted by non-amino acids. The terms also encompass an amino acid polymer that has been modified; for example, disulfide bond formation, glycosylation, lipidation, acetylation, phosphorylation, or any other manipulation, such as conjugation with a labeling component. The polypeptide can be isolated from natural sources, can be a produced by recombinant techniques from a eukaryotic or prokaryotic host, or can be a product of synthetic procedures.

[0413] The terms “nucleic acid,” “nucleic acid sequence,” “nucleotide sequence,” or “polynucleotide sequence,” and “polynucleotide” are used interchangeably. They refer to a polymeric form of nucleotides of any length, either deoxyribonucleotides or ribonucleotides, or analogs thereof. The polynucleotide may be either single-stranded or double-stranded, and if single-stranded may be the coding strand or non-coding (antisense) strand. A polynucleotide may comprise modified nucleotides, such as methylated nucleotides and nucleotide analogs. The sequence of nucleotides may be interrupted by non-nucleotide components. A polynucleotide may be further modified after polymerization, such as by conjugation with a labeling component. The nucleic acid may be a recombinant polynucleotide, or a polynucleotide of genomic, cDNA, semisynthetic, or synthetic origin which either does not occur in nature or is linked to another polynucleotide in a non-natural arrangement.

[0414] The term “isolated,” as used herein, refers to material that is removed from its original or native environment (e.g., the natural environment if it is naturally occurring). For example, a naturally-occurring polynucleotide or polypeptide present in a living animal is not isolated, but the same polynucleotide or polypeptide, separated by human intervention from some or all of the co-existing materials in the natural system, is isolated. Such polynucleotides could be part of a vector and/or such polynucleotides or polypeptides could be part of a composition, and still be isolated in that such vector or composition is not part of the environment in which it is found in nature.

[0415] Various aspects of the invention are described in further detail below. Additional definitions are set out throughout the specification.

### Antibody Molecules

[0416] In one embodiment, the antibody molecule binds to a TCRBV antigen, e.g., a (e.g., a TCRBV antigen corresponding to a biased TCRBV clonotype). In some embodiments, the TCRBV antigen is, e.g., a mammalian, e.g., a human, TCRBV antigen. In some embodiments, the antibody molecule binds to a TCRBV antigen on an lymphocyte, e.g., T cell, e.g., a mammalian, e.g., a human, lymphocyte, e.g., T cell. For example, the antibody molecule binds specifically to a TCRBV antigen expressed, e.g., as part of a TCR comprising the TCRBV, on the surface of an lymphocyte, e.g., T cell.

[0417] In an embodiment, an antibody molecule is a monospecific antibody molecule and binds a single epitope. E.g., a monospecific antibody molecule having a plurality of immunoglobulin variable domain sequences, each of which binds the same epitope.

[0418] In an embodiment an antibody molecule is a multispecific or multifunctional antibody molecule, e.g., it comprises a plurality of immunoglobulin variable domains sequences, wherein a first immunoglobulin variable domain sequence of the plurality has binding specificity for a first epitope and a second immunoglobulin variable domain sequence of the plurality has binding specificity for a second epitope. In an embodiment the first and second epitopes are on the same antigen, e.g., the same protein (or subunit of a multimeric protein). In an embodiment the first and second epitopes overlap. In an embodiment the first and second epitopes do not overlap. In an embodiment the first and second epitopes are on different antigens, e.g., the different proteins (or different subunits of a multimeric protein). In an embodiment a multispecific antibody molecule comprises a third, fourth or fifth immunoglobulin variable domain. In an embodiment, a multispecific antibody molecule is a bispecific antibody molecule, a trispecific antibody molecule, or a tetraspecific antibody molecule.

[0419] In an embodiment a multispecific antibody molecule is a bispecific antibody molecule. A bispecific antibody has specificity for no more than two antigens. A bispecific antibody molecule is characterized by a first immunoglobulin variable domain sequence which has binding specificity for a first epitope and a second immunoglobulin variable domain sequence that has binding specificity for a second epitope. In an embodiment the first and second epitopes are on the same antigen, e.g., the same protein (or subunit of a multimeric protein). In an embodiment the first and second epitopes overlap. In an embodiment the first and second epitopes do not overlap. In an embodiment the first and second epitopes are on different antigens, e.g., the different proteins (or different subunits of a multimeric protein). In an embodiment a bispecific antibody molecule comprises a heavy chain variable domain sequence and a light chain variable domain sequence which have binding specificity for a first epitope and a heavy chain variable domain sequence and a light chain variable domain sequence which have binding specificity for a second epitope. In an embodiment a bispecific antibody molecule comprises a half antibody having binding specificity for a first epitope and a half antibody having binding specificity for a second epitope. In an embodiment a bispecific antibody molecule comprises a half antibody, or fragment thereof, having binding specificity for a first epitope and a half antibody, or fragment thereof, having binding specificity for a second epitope. In an embodiment a bispecific antibody molecule comprises a scFv or a Fab, or fragment thereof, have binding specificity for a first epitope and a scFv or a Fab, or fragment thereof, have binding specificity for a second epitope.

[0420] In an embodiment, an antibody molecule comprises a diabody, and a single-chain molecule, as well as an antigen-binding fragment of an antibody (e.g., Fab, F(ab′)₂, and Fv). For example, an antibody molecule can include a heavy (H) chain variable domain sequence (abbreviated herein as VH), and a light (L) chain variable domain sequence (abbreviated herein as VL). In an embodiment an antibody molecule comprises or consists of a heavy chain and a light chain (referred to herein as a half antibody. In another example, an antibody molecule includes two heavy (H) chain variable domain sequences and two light (L) chain variable domain sequence, thereby forming two antigen binding sites, such as Fab, Fab′, F(ab′)₂, Fc, Fd, Fd′, Fv, single chain antibodies (scFv for example), single variable domain antibodies, diabodies (Dab) (bivalent and bispecific), and chimeric (e.g., humanized) antibodies, which may be produced by the modification of whole antibodies or those synthesized de novo using recombinant DNA technologies. These functional antibody fragments retain the ability to selectively bind with their respective antigen or receptor. Antibodies and antibody fragments can be from any class of antibodies including, but not limited to, IgG, IgA, IgM, IgD, and IgE, and from any subclass (e.g., IgG1, IgG2, IgG3, and IgG4) of antibodies. The a preparation of antibody molecules can be monoclonal or polyclonal. An antibody molecule can also be a human, humanized, CDR-grafted, or in vitro generated antibody. The antibody can have a heavy chain constant region chosen from, e.g., IgG1, IgG2, IgG3, or IgG4. The antibody can also have a light chain chosen from, e.g., kappa or lambda. The term “immunoglobulin” (Ig) is used interchangeably with the term “antibody” herein.

[0421] Examples of antigen-binding fragments of an antibody molecule include: (i) a Fab fragment, a monovalent fragment consisting of the VL, VH, CL and CH1 domains; (ii) a F(ab′)2 fragment, a bivalent fragment comprising two Fab fragments linked by a disulfide bridge at the hinge region; (iii) a Fd fragment consisting of the VH and CH1 domains; (iv) a Fv fragment consisting of the VL and VH domains of a single arm of an antibody, (v) a diabody (dAb) fragment, which consists of a VH domain; (vi) a camelid or camelized variable domain; (vii) a single chain Fv (scFv), see e.g., Bird et al. (1988) Science 242:423-426; and Huston et al. (1988) Proc. Natl. Acad. Sci. USA 85:5879-5883); (viii) a single domain antibody. These antibody fragments are obtained using conventional techniques known to those with skill in the art, and the fragments are screened for utility in the same manner as are intact antibodies.

[0422] Antibody molecules include intact molecules as well as functional fragments thereof. Constant regions of the antibody molecules can be altered, e.g., mutated, to modify the properties of the antibody (e.g., to increase or decrease one or more of: Fc receptor binding, antibody glycosylation, the number of cysteine residues, effector cell function, or complement function).

[0423] Antibody molecules can also be single domain antibodies. Single domain antibodies can include antibodies whose complementary determining regions are part of a single domain polypeptide. Examples include, but are not limited to, heavy chain antibodies, antibodies naturally devoid of light chains, single domain antibodies derived from conventional 4-chain antibodies, engineered antibodies and single domain scaffolds other than those derived from antibodies. Single domain antibodies may be any of the art, or any future single domain antibodies. Single domain antibodies may be derived from any species including, but not limited to mouse, human, camel, llama, fish, shark, goat, rabbit, and bovine. According to another aspect of the invention, a single domain antibody is a naturally occurring single domain antibody known as heavy chain antibody devoid of light chains. Such single domain antibodies are disclosed in WO 9404678, for example. For clarity reasons, this variable domain derived from a heavy chain antibody naturally devoid of light chain is known herein as a VHH or nanobody to distinguish it from the conventional VH of four chain immunoglobulins. Such a VHH molecule can be derived from antibodies raised in Camelidae species, for example in camel, llama, dromedary, alpaca and guanaco. Other species besides Camelidae may produce heavy chain antibodies naturally devoid of light chain; such VHHs are within the scope of the invention.

[0424] The VH and VL regions can be subdivided into regions of hypervariability, termed “complementarity determining regions” (CDR), interspersed with regions that are more conserved, termed “framework regions” (FR or FW).

[0425] The extent of the framework region and CDRs has been precisely defined by a number of methods (see, Kabat, E. A., et al. (1991) Sequences of Proteins of Immunological Interest, Fifth Edition, U.S. Department of Health and Human Services, NIH Publication No. 91-3242; Chothia, C. et al. (1987) J. Mol. Biol. 196:901-917; and the AbM definition used by Oxford Molecular's AbM antibody modeling software. See, generally, e.g., Protein Sequence and Structure Analysis of Antibody Variable Domains. In: Antibody Engineering Lab Manual (Ed.: Duebel, S. and Kontermann, R., Springer-Verlag, Heidelberg).

[0426] The terms “complementarity determining region,” and “CDR,” as used herein refer to the sequences of amino acids within antibody variable regions which confer antigen specificity and binding affinity. In general, there are three CDRs in each heavy chain variable region (HCDR1, HCDR2, HCDR3) and three CDRs in each light chain variable region (LCDR1, LCDR2, LCDR3).

[0427] The precise amino acid sequence boundaries of a given CDR can be determined using any of a number of known schemes, including those described by Kabat et al. (1991), “Sequences of Proteins of Immunological Interest,” 5th Ed. Public Health Service, National Institutes of Health, Bethesda, Md. (“Kabat” numbering scheme), Al-Lazikani et al., (1997) JMB 273, 927-948 (“Chothia” numbering scheme). As used herein, the CDRs defined according the “Chothia” number scheme are also sometimes referred to as “hypervariable loops.”

[0428] For example, under Kabat, the CDR amino acid residues in the heavy chain variable domain (VH) are numbered 31-35 (HCDR1), 50-65 (HCDR2), and 95-102 (HCDR3); and the CDR amino acid residues in the light chain variable domain (VL) are numbered 24-34 (LCDR1), 50-56 (LCDR2), and 89-97 (LCDR3). Under Chothia, the CDR amino acids in the VH are numbered 26-32 (HCDR1), 52-56 (HCDR2), and 95-102 (HCDR3); and the amino acid residues in VL are numbered 26-32 (LCDR1), 50-52 (LCDR2), and 91-96 (LCDR3).

[0429] Each VH and VL typically includes three CDRs and four FRs, arranged from amino-terminus to carboxy-terminus in the following order: FR1, CDR1, FR2, CDR2, FR3, CDR3, FR4.

[0430] The antibody molecule can be a polyclonal or a monoclonal antibody.

[0431] The terms “monoclonal antibody” or “monoclonal antibody composition” as used herein refer to a preparation of antibody molecules of single molecular composition. A monoclonal antibody composition displays a single binding specificity and affinity for a particular epitope. A monoclonal antibody can be made by hybridoma technology or by methods that do not use hybridoma technology (e.g., recombinant methods).

[0432] The antibody can be recombinantly produced, e.g., produced by phage display or by combinatorial methods.

[0433] Phage display and combinatorial methods for generating antibodies are known in the art (as described in, e.g., Ladner et al. U.S. Pat. No. 5,223,409; Kang et al. International Publication No. WO 92/18619; Dower et al. International Publication No. WO 91/17271; Winter et al. International Publication WO 92/20791; Markland et al. International Publication No. WO 92/15679; Breitling et al. International Publication WO 93/01288; McCafferty et al. International Publication No. WO 92/01047; Garrard et al. International Publication No. WO 92/09690; Ladner et al. International Publication No. WO 90/02809; Fuchs et al. (1991) Bio/Technology 9:1370-1372; Hay et al. (1992) Hum Antibod Hybridomas 3:81-85; Huse et al. (1989) Science 246:1275-1281; Griffths et al. (1993) EMBO J 12:725-734; Hawkins et al. (1992) J. Mol Biol 226:889-896; Clackson et al. (1991) Nature 352:624-628; Gram et al. (1992) PNAS 89:3576-3580; Garrad et al. (1991) Bio/Technology 9:1373-1377; Hoogenboom et al. (1991) Nuc Acid Res 19:4133-4137; and Barbas et al. (1991) PNAS 88:7978-7982, the contents of all of which are incorporated by reference herein).

[0434] In one embodiment, the antibody is a fully human antibody (e.g., an antibody made in a mouse which has been genetically engineered to produce an antibody from a human immunoglobulin sequence), or a non-human antibody, e.g., a rodent (mouse or rat), goat, primate (e.g., monkey), camel antibody. Preferably, the non-human antibody is a rodent (mouse or rat antibody). Methods of producing rodent antibodies are known in the art.

[0435] Human monoclonal antibodies can be generated using transgenic mice carrying the human immunoglobulin genes rather than the mouse system. Splenocytes from these transgenic mice immunized with the antigen of interest are used to produce hybridomas that secrete human mAbs with specific affinities for epitopes from a human protein (see, e.g., Wood et al. International Application WO 91/00906, Kucherlapati et al. PCT publication WO 91/10741; Lonberg et al. International Application WO 92/03918; Kay et al. International Application 92/03917; Lonberg, N. et al. 1994 Nature 368:856-859; Green, L. L. et al. 1994 Nature Genet. 7:13-21; Morrison, S. L. et al. 1994 Proc. Natl. Acad. Sci. USA 81:6851-6855; Bruggeman et al. 1993 Year Immunol 7:33-40; Tuaillon et al. 1993 PNAS 90:3720-3724; Bruggeman et al. 1991 Eur J Immunol 21:1323-1326).

[0436] An antibody molecule can be one in which the variable region, or a portion thereof, e.g., the CDRs, are generated in a non-human organism, e.g., a rat or mouse. Chimeric, CDR-grafted, and humanized antibodies are within the invention. Antibody molecules generated in a non-human organism, e.g., a rat or mouse, and then modified, e.g., in the variable framework or constant region, to decrease antigenicity in a human are within the invention.

[0437] An “effectively human” protein is a protein that does substantially not evoke a neutralizing antibody response, e.g., the human anti-murine antibody (HAMA) response. HAMA can be problematic in a number of circumstances, e.g., if the antibody molecule is administered repeatedly, e.g., in treatment of a chronic or recurrent disease condition. A HAMA response can make repeated antibody administration potentially ineffective because of an increased antibody clearance from the serum (see, e.g., Saleh et al., Cancer Immunol. Immunother., 32:180-190 (1990)) and also because of potential allergic reactions (see, e.g., LoBuglio et al., Hybridoma, 5:5117-5123 (1986)).

[0438] Chimeric antibodies can be produced by recombinant DNA techniques known in the art (see Robinson et al., International Patent Publication PCT/US86/02269; Akira, et al., European Patent Application 184,187; Taniguchi, M., European Patent Application 171,496; Morrison et al., European Patent Application 173,494; Neuberger et al., International Application WO 86/01533; Cabilly et al. U.S. Pat. No. 4,816,567; Cabilly et al., European Patent Application 125,023; Better et al. (1988 Science 240:1041-1043); Liu et al. (1987) PNAS 84:3439-3443; Liu et al., 1987, J. Immunol. 139:3521-3526; Sun et al. (1987) PNAS 84:214-218; Nishimura et al., 1987, Canc. Res. 47:999-1005; Wood et al. (1985) Nature 314:446-449; and Shaw et al., 1988, J. Natl Cancer Inst. 80:1553-1559).

[0439] A humanized or CDR-grafted antibody will have at least one or two but generally all three recipient CDRs (of heavy and or light immuoglobulin chains) replaced with a donor CDR. The antibody may be replaced with at least a portion of a non-human CDR or only some of the CDRs may be replaced with non-human CDRs. It is only necessary to replace the number of CDRs required for binding to the antigen. Preferably, the donor will be a rodent antibody, e.g., a rat or mouse antibody, and the recipient will be a human framework or a human consensus framework. Typically, the immunoglobulin providing the CDRs is called the “donor” and the immunoglobulin providing the framework is called the “acceptor.” In one embodiment, the donor immunoglobulin is a non-human (e.g., rodent). The acceptor framework is a naturally-occurring (e.g., a human) framework or a consensus framework, or a sequence about 85% or higher, preferably 90%, 95%, 99% or higher identical thereto.

[0440] As used herein, the term “consensus sequence” refers to the sequence formed from the most frequently occurring amino acids (or nucleotides) in a family of related sequences (See e.g., Winnaker, From Genes to Clones (Verlagsgesellschaft, Weinheim, Germany 1987). In a family of proteins, each position in the consensus sequence is occupied by the amino acid occurring most frequently at that position in the family. If two amino acids occur equally frequently, either can be included in the consensus sequence. A “consensus framework” refers to the framework region in the consensus immunoglobulin sequence.

[0441] An antibody molecule can be humanized by methods known in the art (see e.g., Morrison, S. L., 1985, Science 229:1202-1207, by Oi et al., 1986, BioTechniques 4:214, and by Queen et al. U.S. Pat. Nos. 5,585,089, 5,693,761 and 5,693,762, the contents of all of which are hereby incorporated by reference).

[0442] Humanized or CDR-grafted antibody molecules can be produced by CDR-grafting or CDR substitution, wherein one, two, or all CDRs of an immunoglobulin chain can be replaced. See e.g., U.S. Pat. No. 5,225,539; Jones et al. 1986 Nature 321:552-525; Verhoeyan et al. 1988 Science 239:1534; Beidler et al. 1988 J. Immunol. 141:4053-4060; Winter U.S. Pat. No. 5,225,539, the contents of all of which are hereby expressly incorporated by reference. Winter describes a CDR-grafting method which may be used to prepare the humanized antibodies of the present invention (UK Patent Application GB 2188638A, filed on Mar. 26, 1987; Winter U.S. Pat. No. 5,225,539), the contents of which is expressly incorporated by reference.

[0443] Also within the scope of the invention are humanized antibody molecules in which specific amino acids have been substituted, deleted or added. Criteria for selecting amino acids from the donor are described in U.S. Pat. No. 5,585,089, e.g., columns 12-16 of U.S. Pat. No. 5,585,089, e.g., columns 12-16 of U.S. Pat. No. 5,585,089, the contents of which are hereby incorporated by reference. Other techniques for humanizing antibodies are described in Padlan et al. EP 519596 A1, published on Dec. 23, 1992.

[0444] The antibody molecule can be a single chain antibody. A single-chain antibody (scFv) may be engineered (see, for example, Colcher, D. et al. (1999) Ann NY Acad Sci 880:263-80; and Reiter, Y. (1996) Clin Cancer Res 2:245-52). The single chain antibody can be dimerized or multimerized to generate multivalent antibodies having specificities for different epitopes of the same target protein.

[0445] In yet other embodiments, the antibody molecule has a heavy chain constant region chosen from, e.g., the heavy chain constant regions of IgG1, IgG2, IgG3, IgG4, IgM, IgA1, IgA2, IgD, and IgE; particularly, chosen from, e.g., the (e.g., human) heavy chain constant regions of IgG1, IgG2, IgG3, and IgG4. In another embodiment, the antibody molecule has a light chain constant region chosen from, e.g., the (e.g., human) light chain constant regions of kappa or lambda. The constant region can be altered, e.g., mutated, to modify the properties of the antibody (e.g., to increase or decrease one or more of: Fc receptor binding, antibody glycosylation, the number of cysteine residues, effector cell function, and/or complement function). In one embodiment the antibody has: effector function; and can fix complement. In other embodiments the antibody does not; recruit effector cells; or fix complement. In another embodiment, the antibody has reduced or no ability to bind an Fc receptor. For example, it is a isotype or subtype, fragment or other mutant, which does not support binding to an Fc receptor, e.g., it has a mutagenized or deleted Fc receptor binding region.

[0446] Methods for altering an antibody constant region are known in the art. Antibodies with altered function, e.g. altered affinity for an effector ligand, such as FcR on a cell, or the C1 component of complement can be produced by replacing at least one amino acid residue in the constant portion of the antibody with a different residue (see e.g., EP 388,151 A1, U.S. Pat. Nos. 5,624,821 and 5,648,260, the contents of all of which are hereby incorporated by reference). Similar type of alterations could be described which if applied to the murine, or other species immunoglobulin would reduce or eliminate these functions.

[0447] An antibody molecule can be derivatized or linked to another functional molecule (e.g., another peptide or protein). As used herein, a “derivatized” antibody molecule is one that has been modified. Methods of derivatization include but are not limited to the addition of a fluorescent moiety, a radionucleotide, a toxin, an enzyme or an affinity ligand such as biotin. Accordingly, the antibody molecules of the invention are intended to include derivatized and otherwise modified forms of the antibodies described herein, including immunoadhesion molecules. For example, an antibody molecule can be functionally linked (by chemical coupling, genetic fusion, noncovalent association or otherwise) to one or more other molecular entities, such as another antibody (e.g., a bispecific antibody or a diabody), a detectable agent, a cytotoxic agent, a pharmaceutical agent, and/or a protein or peptide that can mediate association of the antibody or antibody portion with another molecule (such as a streptavidin core region or a polyhistidine tag).

[0448] One type of derivatized antibody molecule is produced by crosslinking two or more antibodies (of the same type or of different types, e.g., to create bispecific antibodies). Suitable crosslinkers include those that are heterobifunctional, having two distinctly reactive groups separated by an appropriate spacer (e.g., m-maleimidobenzoyl-N-hydroxysuccinimide ester) or homobifunctional (e.g., disuccinimidyl suberate). Such linkers are available from Pierce Chemical Company, Rockford, Ill.

### Multispecific or Multifunctional Antibody Molecules

[0449] Exemplary structures of multispecific and multifunctional molecules defined herein are described throughout. Exemplary structures are further described in: Weidle U et al. (2013) The Intriguing Options of Multispecific Antibody Formats for Treatment of Cancer. Cancer Genomics & Proteomics 10: 1-18 (2013); and Spiess C et al. (2015) Alternative molecular formats and therapeutic applications for bispecific antibodies. Molecular Immunology 67: 95-106; the full contents of each of which is incorporated by reference herein).

[0450] In embodiments, multispecific antibody molecules can comprise more than one antigen-binding site, where different sites are specific for different antigens. In embodiments, multispecific antibody molecules can bind more than one (e.g., two or more) epitopes on the same antigen. In embodiments, multispecific antibody molecules comprise an antigen-binding site specific for a target cell (e.g., lymphocyte (e.g., T cell) comprising a TCRBV antigen corresponding to a biased TCRBV clonotype) and a different antigen-binding site specific for an immune effector cell. In one embodiment, the multispecific antibody molecule is a bispecific antibody molecule. Bispecific antibody molecules can be classified into five different structural groups: (i) bispecific immunoglobulin G (BsIgG); (ii) IgG appended with an additional antigen-binding moiety; (iii) bispecific antibody fragments; (iv) bispecific fusion proteins; and (v) bispecific antibody conjugates.

[0451] BsIgG is a format that is monovalent for each antigen. Exemplary BsIgG formats include but are not limited to crossMab, DAF (two-in-one), DAF (four-in-one), DutaMab, DT-IgG, knobs-in-holes common LC, knobs-in-holes assembly, charge pair, Fab-arm exchange, SEEDbody, triomab, LUZ-Y, Fcab, κλ-body, orthogonal Fab. See Spiess et al. Mol. Immunol. 67(2015):95-106. Exemplary BsIgGs include catumaxomab (Fresenius Biotech, Trion Pharma, Neopharm), which contains an anti-CD3 arm and an anti-EpCAM arm; and ertumaxomab (Neovii Biotech, Fresenius Biotech), which targets CD3 and HER2. In some embodiments, BsIgG comprises heavy chains that are engineered for heterodimerization. For example, heavy chains can be engineered for heterodimerization using a “knobs-into-holes” strategy, a SEED platform, a common heavy chain (e.g., in κλ-bodies), and use of heterodimeric Fc regions. See Spiess et al. Mol. Immunol. 67(2015):95-106. Strategies that have been used to avoid heavy chain pairing of homodimers in BsIgG include knobs-in-holes, duobody, azymetric, charge pair, HA-TF, SEEDbody, and differential protein A affinity. See Id. BsIgG can be produced by separate expression of the component antibodies in different host cells and subsequent purification/assembly into a BsIgG. BsIgG can also be produced by expression of the component antibodies in a single host cell. BsIgG can be purified using affinity chromatography, e.g., using protein A and sequential pH elution.

[0452] IgG appended with an additional antigen-binding moiety is another format of bispecific antibody molecules. For example, monospecific IgG can be engineered to have bispecificity by appending an additional antigen-binding unit onto the monospecific IgG, e.g., at the N- or C-terminus of either the heavy or light chain. Exemplary additional antigen-binding units include single domain antibodies (e.g., variable heavy chain or variable light chain), engineered protein scaffolds, and paired antibody variable domains (e.g., single chain variable fragments or variable fragments). See Id. Examples of appended IgG formats include dual variable domain IgG (DVD-Ig), IgG(H)-scFv, scFv-(H)IgG, IgG(L)-scFv, scFv-(L)IgG, IgG(L,H)-Fv, IgG(H)-V, V(H)—IgG, IgG(L)-V, V(L)-IgG, KIH IgG-scFab, 2scFv-IgG, IgG-2scFv, scFv4-Ig, zybody, and DVI-IgG (four-in-one). See Spiess et al. Mol. Immunol. 67(2015):95-106. An example of an IgG-scFv is MM-141 (Merrimack Pharmaceuticals), which binds IGF-1R and HER3. Examples of DVD-Ig include ABT-981 (AbbVie), which binds IL-la and IL-10; and ABT-122 (AbbVie), which binds TNF and IL-17A.

[0453] Bispecific antibody fragments (BsAb) are a format of bispecific antibody molecules that lack some or all of the antibody constant domains. For example, some BsAb lack an Fc region. In embodiments, bispecific antibody fragments include heavy and light chain regions that are connected by a peptide linker that permits efficient expression of the BsAb in a single host cell. Exemplary bispecific antibody fragments include but are not limited to nanobody, nanobody-HAS, BiTE, Diabody, DART, TandAb, scDiabody, scDiabody-CH3, Diabody-CH3, triple body, miniantibody, minibody, TriBi minibody, scFv-CH3 KIH, Fab-scFv, scFv-CH-CL-scFv, F(ab′)2, F(ab′)2-scFv2, scFv-KIH, Fab-scFv-Fc, tetravalent HCAb, scDiabody-Fc, Diabody-Fc, tandem scFv-Fc, and intrabody. See Id. For example, the BiTE format comprises tandem scFvs, where the component scFvs bind to CD3 on T cells and a TCRBV antigen on lymphocytes, e.g. T cells.

[0454] Bispecific fusion proteins include antibody fragments linked to other proteins, e.g., to add additional specificity and/or functionality. An example of a bispecific fusion protein is an immTAC, which comprises an anti-CD3 scFv linked to an affinity-matured T-cell receptor that recognizes HLA-presented peptides. In embodiments, the dock-and-lock (DNL) method can be used to generate bispecific antibody molecules with higher valency. Also, fusions to albumin binding proteins or human serum albumin can be extend the serum half-life of antibody fragments. See Id.

[0455] In embodiments, chemical conjugation, e.g., chemical conjugation of antibodies and/or antibody fragments, can be used to create BsAb molecules. See Id. An exemplary bispecific antibody conjugate includes the CovX-body format, in which a low molecular weight drug is conjugated site-specifically to a single reactive lysine in each Fab arm or an antibody or fragment thereof. In embodiments, the conjugation improves the serum half-life of the low molecular weight drug. An exemplary CovX-body is CVX-241 (NCT01004822), which comprises an antibody conjugated to two short peptides inhibiting either VEGF or Ang2. See Id.

[0456] The antibody molecules can be produced by recombinant expression, e.g., of at least one or more component, in a host system. Exemplary host systems include eukaryotic cells (e.g., mammalian cells, e.g., CHO cells, or insect cells, e.g., SF9 or S2 cells) and prokaryotic cells (e.g., E. coli). Bispecific antibody molecules can be produced by separate expression of the components in different host cells and subsequent purification/assembly. Alternatively, the antibody molecules can be produced by expression of the components in a single host cell. Purification of bispecific antibody molecules can be performed by various methods such as affinity chromatography, e.g., using protein A and sequential pH elution. In other embodiments, affinity tags can be used for purification, e.g., histidine-containing tag, myc tag, or streptavidin tag.

### CDR-Grafted Scaffolds

[0457] In embodiments, the antibody molecule is a CDR-grafted scaffold domain. In embodiments, the scaffold domain is based on a fibronectin domain, e.g., fibronectin type III domain. The overall fold of the fibronectin type III (Fn3) domain is closely related to that of the smallest functional antibody fragment, the variable domain of the antibody heavy chain. There are three loops at the end of Fn3; the positions of BC, DE and FG loops approximately correspond to those of CDR1, 2 and 3 of the VH domain of an antibody. Fn3 does not have disulfide bonds; and therefore Fn3 is stable under reducing conditions, unlike antibodies and their fragments (see, e.g., WO 98/56915; WO 01/64942; WO 00/34784). An Fn3 domain can be modified (e.g., using CDRs or hypervariable loops described herein) or varied, e.g., to select domains that bind to an antigen/marker/cell described herein.

[0458] In embodiments, a scaffold domain, e.g., a folded domain, is based on an antibody, e.g., a “minibody” scaffold created by deleting three beta strands from a heavy chain variable domain of a monoclonal antibody (see, e.g., Tramontano et al., 1994, J Mol. Recognit. 7:9; and Martin et al., 1994, EMBO J. 13:5303-5309). The “minibody” can be used to present two hypervariable loops. In embodiments, the scaffold domain is a V-like domain (see, e.g., Coia et al. WO 99/45110) or a domain derived from tendamistatin, which is a 74 residue, six-strand beta sheet sandwich held together by two disulfide bonds (see, e.g., McConnell and Hoess, 1995, J Mol. Biol. 250:460). For example, the loops of tendamistatin can be modified (e.g., using CDRs or hypervariable loops) or varied, e.g., to select domains that bind to a marker/antigen/cell described herein. Another exemplary scaffold domain is a beta-sandwich structure derived from the extracellular domain of CTLA-4 (see, e.g., WO 00/60070).

[0459] Other exemplary scaffold domains include but are not limited to T-cell receptors; MHC proteins; extracellular domains (e.g., fibronectin Type III repeats, EGF repeats); protease inhibitors (e.g., Kunitz domains, ecotin, BPTI, and so forth); TPR repeats; trifoil structures; zinc finger domains; DNA-binding proteins; particularly monomeric DNA binding proteins; RNA binding proteins; enzymes, e.g., proteases (particularly inactivated proteases), RNase; chaperones, e.g., thioredoxin, and heat shock proteins; and intracellular signaling domains (such as SH2 and SH3 domains). See, e.g., US 20040009530 and U.S. Pat. No. 7,501,121, incorporated herein by reference.

[0460] In embodiments, a scaffold domain is evaluated and chosen, e.g., by one or more of the following criteria: (1) amino acid sequence, (2) sequences of several homologous domains, (3) 3-dimensional structure, and/or (4) stability data over a range of pH, temperature, salinity, organic solvent, oxidant concentration. In embodiments, the scaffold domain is a small, stable protein domain, e.g., a protein of less than 100, 70, 50, 40 or 30 amino acids. The domain may include one or more disulfide bonds or may chelate a metal, e.g., zinc.

### Antibody-Based Fusions

[0461] A variety of formats can be generated which contain additional binding entities attached to the N or C terminus of antibodies. These fusions with single chain or disulfide stabilized Fvs or Fabs result in the generation of tetravalent molecules with bivalent binding specificity for each antigen. Combinations of scFvs and scFabs with IgGs enable the production of molecules which can recognize three or more different antigens.

### Antibody-Fab Fusion

[0462] Antibody-Fab fusions are bispecific antibodies comprising a traditional antibody to a first target and a Fab to a second target fused to the C terminus of the antibody heavy chain. Commonly the antibody and the Fab will have a common light chain. Antibody fusions can be produced by (1) engineering the DNA sequence of the target fusion, and (2) transfecting the target DNA into a suitable host cell to express the fusion protein. It seems like the antibody-scFv fusion may be linked by a (Gly)-Ser linker between the C-terminus of the CH3 domain and the N-terminus of the scFv, as described by Coloma, J. et al. (1997) Nature Biotech 15:159.

### Antibody-scFv Fusion

[0463] Antibody-scFv Fusions are bispecific antibodies comprising a traditional antibody and a scFv of unique specificity fused to the C terminus of the antibody heavy chain. The scFv can be fused to the C terminus through the Heavy Chain of the scFv either directly or through a linker peptide. Antibody fusions can be produced by (1) engineering the DNA sequence of the target fusion, and (2) transfecting the target DNA into a suitable host cell to express the fusion protein. It seems like the antibody-scFv fusion may be linked by a (Gly)-Ser linker between the C-terminus of the CH3 domain and the N-terminus of the scFv, as described by Coloma, J. et al. (1997) Nature Biotech 15:159.

### Variable Domain Immunoglobulin DVD

[0464] A related format is the dual variable domain immunoglobulin (DVD), which are composed of VH and VL domains of a second specificity place upon the N termini of the V domains by shorter linker sequences.

[0465] Other exemplary multispecific antibody formats include, e.g., those described in the following US20160114057A1, US20130243775A1, US20140051833, US20130022601, US20150017187A1, US20120201746A1, US20150133638A1, US20130266568A1, US20160145340A1, WO2015127158A1, US20150203591A1, US20140322221A1, US20130303396A1, US20110293613, US20130017200A1, US20160102135A1, WO2015197598A2, WO2015197582A1, U.S. Pat. No. 9,359,437, US20150018529, WO2016115274A1, WO2016087416A1, US20080069820A1, U.S. Pat. Nos. 9,145,588B, 7,919,257, and US20150232560A1. Exemplary multispecific molecules utilizing a full antibody-Fab/scFab format include those described in the following, U.S. Pat. No. 9,382,323B2, US20140072581A1, US20140308285A1, US20130165638A1, US20130267686A1, US20140377269A1, U.S. Pat. No. 7,741,446B2, and WO1995009917A1. Exemplary multispecific molecules utilizing a domain exchange format include those described in the following, US20150315296A1, WO2016087650A1, US20160075785A1, WO2016016299A1, US20160130347A1, US20150166670, U.S. Pat. No. 8,703,132B2, US20100316645, U.S. Pat. No. 8,227,577B2, US20130078249.

### Fc-Containing Entities (Mini-Antibodies)

[0466] Fc-containing entities, also known as mini-antibodies, can be generated by fusing scFv to the C-termini of constant heavy region domain 3 (CH3-scFv) and/or to the hinge region (scFv-hinge-Fc) of an antibody with a different specificity. Trivalent entities can also be made which have disulfide stabilized variable domains (without peptide linker) fused to the C-terminus of CH3 domains of IgGs.

### Fc-Containing Multispecific Molecules

[0467] In some embodiments, the multispecific molecules disclosed herein includes an immunoglobulin constant region (e.g., an Fc region). Exemplary Fc regions can be chosen from the heavy chain constant regions of IgG1, IgG2, IgG3 or IgG4; more particularly, the heavy chain constant region of human IgG1, IgG2, IgG3, or IgG4.

[0468] In some embodiments, the immunoglobulin chain constant region (e.g., the Fc region) is altered, e.g., mutated, to increase or decrease one or more of: Fc receptor binding, antibody glycosylation, the number of cysteine residues, effector cell function, or complement function.

[0469] In other embodiments, an interface of a first and second immunoglobulin chain constant regions (e.g., a first and a second Fc region) is altered, e.g., mutated, to increase or decrease dimerization, e.g., relative to a non-engineered interface, e.g., a naturally-occurring interface. For example, dimerization of the immunoglobulin chain constant region (e.g., the Fc region) can be enhanced by providing an Fc interface of a first and a second Fc region with one or more of: a paired protuberance-cavity (“knob-in-a hole”), an electrostatic interaction, or a strand-exchange, such that a greater ratio of heteromultimer to homomultimer forms, e.g., relative to a non-engineered interface.

[0470] In some embodiments, the multispecific molecules include a paired amino acid substitution at a position chosen from one or more of 347, 349, 350, 351, 366, 368, 370, 392, 394, 395, 397, 398, 399, 405, 407, or 409, e.g., of the Fc region of human IgG1 For example, the immunoglobulin chain constant region (e.g., Fc region) can include a paired an amino acid substitution chosen from: T366S, L368A, or Y407V (e.g., corresponding to a cavity or hole), and T366W (e.g., corresponding to a protuberance or knob).

[0471] In other embodiments, the multifunctional molecule includes a half-life extender, e.g., a human serum albumin or an antibody molecule to human serum albumin.

### Heterodimerized Antibody Molecules & Methods of Making

[0472] Various methods of producing multispecific antibodies have been disclosed to address the problem of incorrect heavy chain pairing. Exemplary methods are described below. Exemplary multispecific antibody formats and methods of making said multispecific antibodies are also disclosed in e.g., Speiss et al. Molecular Immunology 67 (2015) 95-106; and Klein et al mAbs 4:6, 653-663; November/December 2012; the entire contents of each of which are incorporated by reference herein.

[0473] Heterodimerized bispecific antibodies are based on the natural IgG structure, wherein the two binding arms recognize different antigens. IgG derived formats that enable defined monovalent (and simultaneous) antigen binding are generated by forced heavy chain heterodimerization, combined with technologies that minimize light chain mispairing (e.g., common light chain). Forced heavy chain heterodimerization can be obtained using, e.g., knob-in-hole OR strand exchange engineered domains (SEED).

[0474] Knob-in-Hole

[0475] Knob-in-Hole as described in U.S. Pat. Nos. 5,731,116, 7,476,724 and Ridgway, J. et al. (1996) Prot. Engineering 9(7): 617-621, broadly involves: (1) mutating the CH3 domain of one or both antibodies to promote heterodimerization; and (2) combining the mutated antibodies under conditions that promote heterodimerization. “Knobs” or “protuberances” are typically created by replacing a small amino acid in a parental antibody with a larger amino acid (e.g., T366Y or T366W); “Holes” or “cavities” are created by replacing a larger residue in a parental antibody with a smaller amino acid (e.g., Y407T, T366S, L368A and/or Y407V).

[0476] For bispecific antibodies including an Fc domain, introduction of specific mutations into the constant region of the heavy chains to promote the correct heterodimerization of the Fc portion can be utilized. Several such techniques are reviewed in Klein et al. (mAbs (2012) 4:6, 1-11), the contents of which are incorporated herein by reference in their entirety. These techniques include the “knobs-into-holes” (KiH) approach which involves the introduction of a bulky residue into one of the CH3 domains of one of the antibody heavy chains. This bulky residue fits into a complementary “hole” in the other CH3 domain of the paired heavy chain so as to promote correct pairing of heavy chains (see e.g., U.S. Pat. No. 7,642,228).

[0477] Exemplary KiH mutations include S354C, T366W in the “knob” heavy chain and Y349C, T366S, L368A, Y407V in the “hole” heavy chain. Other exemplary KiH mutations are provided in Table 1, with additional optional stabilizing Fc cysteine mutations.

TABLE 1
Exemplary Fc KiH mutations and optional Cysteine mutations

| Position | Knob Mutation | Hole Mutation |
|---|---|---|
| T366 | T366W | T366S |
| L368 | — | L368A |
| Y407 | — | Y407V |

Additional Cysteine Mutations to form a stabilizing disulfide bridge

| Position | Knob CH3 | Hole CH3 |
|---|---|---|
| S354 | S354C | — |
| Y349 | — | Y349C |

[0478] Other Fc mutations are provided by Igawa and Tsunoda who identified 3 negatively charged residues in the CH3 domain of one chain that pair with three positively charged residues in the CH3 domain of the other chain. These specific charged residue pairs are: E356-K439, E357-K370, D399-K409 and vice versa. By introducing at least two of the following three mutations in chain A: E356K, E357K and D399K, as well as K370E, K409D, K439E in chain B, alone or in combination with newly identified disulfide bridges, they were able to favor very efficient heterodimerization while suppressing homodimerization at the same time (Martens T et al. A novel one-armed antic-Met antibody inhibits glioblastoma growth in vivo. Clin Cancer Res 2006; 12:6144-52; PMID:17062691). Xencor defined 41 variant pairs based on combining structural calculations and sequence information that were subsequently screened for maximal heterodimerization, defining the combination of S364H, F405A (HA) on chain A and Y349T, T394F on chain B (TF) (Moore G L et al. A novel bispecific antibody format enables simultaneous bivalent and monovalent co-engagement of distinct target antigens. MAbs 2011; 3:546-57; PMID: 22123055).

[0479] Other exemplary Fc mutations to promote heterodimerization of multispecific antibodies include those described in the following references, the contents of each of which is incorporated by reference herein, WO2016071377A1, US20140079689A1, US20160194389A1, US20160257763, WO2016071376A2, WO2015107026A1, WO2015107025A1, WO2015107015A1, US20150353636A1, US20140199294A1, U.S. Pat. No. 7,750,128B2, US20160229915A1, US20150344570A1, U.S. Pat. No. 8,003,774A1, US20150337049A1, US20150175707A1, US20140242075A1, US20130195849A1, US20120149876A1, US20140200331A1, U.S. Pat. No. 9,309,311B2, U.S. Pat. No. 8,586,713, US20140037621A1, US20130178605A1, US20140363426A1, US20140051835A1 and US20110054151A1.

[0480] Stabilizing cysteine mutations have also been used in combination with KiH and other Fc heterodimerization promoting variants, see e.g., U.S. Pat. No. 7,183,076. Other exemplary cysteine modifications include, e.g., those disclosed in US20140348839A1, U.S. Pat. No. 7,855,275B2, and U.S. Pat. No. 9,000,130B2.

[0481] Strand Exchange Engineered Domains (SEED)

[0482] Heterodimeric Fc platform that support the design of bispecific and asymmetric fusion proteins by devising strand-exchange engineered domain (SEED) C(H)3 heterodimers are known. These derivatives of human IgG and IgA C(H)3 domains create complementary human SEED C(H)3 heterodimers that are composed of alternating segments of human IgA and IgG C(H)3 sequences. The resulting pair of SEED C(H)3 domains preferentially associates to form heterodimers when expressed in mammalian cells. SEEDbody (Sb) fusion proteins consist of [IgG1 hinge]-C(H)2-[SEED C(H)3], that may be genetically linked to one or more fusion partners (see e.g., Davis J H et al. SEEDbodies: fusion proteins based on strand exchange engineered domain (SEED) CH3 heterodimers in an Fc analogue platform for asymmetric binders or immunofusions and bispecific antibodies. Protein Eng Des Sel 2010; 23:195-202; PMID:20299542 and U.S. Pat. No. 8,871,912. The contents of each of which are incorporated by reference herein).

[0483] Duobody

[0484] “Duobody” technology to produce bispecific antibodies with correct heavy chain pairing are known. The DuoBody technology involves three basic steps to generate stable bispecific human IgG1 antibodies in a post-production exchange reaction. In a first step, two IgG1 s, each containing single matched mutations in the third constant (CH3) domain, are produced separately using standard mammalian recombinant cell lines. Subsequently, these IgG1 antibodies are purified according to standard processes for recovery and purification. After production and purification (post-production), the two antibodies are recombined under tailored laboratory conditions resulting in a bispecific antibody product with a very high yield (typically >95%) (see e.g., Labrijn et al, PNAS 2013; 110(13):5145-5150 and Labrijn et al. Nature Protocols 2014; 9(10):2450-63, the contents of each of which are incorporated by reference herein).

[0485] Electrostatic Interactions

[0486] Methods of making multispecific antibodies using CH3 amino acid changes with charged amino acids such that homodimer formation is electrostatically unfavorable are disclosed. EP1870459 and WO 2009089004 describe other strategies for favoring heterodimer formation upon co-expression of different antibody domains in a host cell. In these methods, one or more residues that make up the heavy chain constant domain 3 (CH3), CH3-CH3 interfaces in both CH3 domains are replaced with a charged amino acid such that homodimer formation is electrostatically unfavorable and heterodimerization is electrostatically favorable. Additional methods of making multispecific molecules using electrostatic interactions are described in the following references, the contents of each of which is incorporated by reference herein, include US20100015133, U.S. Pat. No. 8,592,562B2, U.S. Pat. No. 9,200,060B2, US20140154254A1, and U.S. Pat. No. 9,358,286A1.

[0487] Common Light Chain

[0488] Light chain mispairing needs to be avoided to generate homogenous preparations of bispecific IgGs. One way to achieve this is through the use of the common light chain principle, i.e. combining two binders that share one light chain but still have separate specificities. An exemplary method of enhancing the formation of a desired bispecific antibody from a mixture of monomers is by providing a common variable light chain to interact with each of the heteromeric variable heavy chain regions of the bispecific antibody. Compositions and methods of producing bispecific antibodies with a common light chain as disclosed in, e.g., U.S. Pat. No. 7,183,076B2, US20110177073A1, EP2847231A1, WO2016079081A1, and EP3055329A1, the contents of each of which is incorporated by reference herein.

[0489] CrossMab

[0490] Another option to reduce light chain mispairing is the CrossMab technology which avoids non-specific L chain mispairing by exchanging CH1 and CL domains in the Fab of one half of the bispecific antibody. Such crossover variants retain binding specificity and affinity, but make the two arms so different that L chain mispairing is prevented. The CrossMab technology (as reviewed in Klein et al. Supra) involves domain swapping between heavy and light chains so as to promote the formation of the correct pairings. Briefly, to construct a bispecific IgG-like CrossMab antibody that could bind to two antigens by using two distinct light chain-heavy chain pairs, a two-step modification process is applied. First, a dimerization interface is engineered into the C-terminus of each heavy chain using a heterodimerization approach, e.g., Knob-into-hole (KiH) technology, to ensure that only a heterodimer of two distinct heavy chains from one antibody (e.g., Antibody A) and a second antibody (e.g., Antibody B) is efficiently formed. Next, the constant heavy 1 (CH1) and constant light (CL) domains of one antibody are exchanged (Antibody A), keeping the variable heavy (VH) and variable light (VL) domains consistent. The exchange of the CH1 and CL domains ensured that the modified antibody (Antibody A) light chain would only efficiently dimerize with the modified antibody (antibody A) heavy chain, while the unmodified antibody (Antibody B) light chain would only efficiently dimerize with the unmodified antibody (Antibody B) heavy chain; and thus only the desired bispecific CrossMab would be efficiently formed (see e.g., Cain, C. SciBX 4(28); doi:10.1038/scibx.2011.783, the contents of which are incorporated by reference herein).

[0491] Common Heavy Chain

[0492] An exemplary method of enhancing the formation of a desired bispecific antibody from a mixture of monomers is by providing a common variable heavy chain to interact with each of the heteromeric variable light chain regions of the bispecific antibody. Compositions and methods of producing bispecific antibodies with a common heavy chain are disclosed in, e.g., US20120184716, US20130317200, and US20160264685A1, the contents of each of which is incorporated by reference herein.

[0493] Amino Acid Modifications

[0494] Alternative compositions and methods of producing multispecific antibodies with correct light chain pairing include various amino acid modifications. For example, Zymeworks describes heterodimers with one or more amino acid modifications in the CH1 and/or CL domains, one or more amino acid modifications in the VH and/or VL domains, or a combination thereof, which are part of the interface between the light chain and heavy chain and create preferential pairing between each heavy chain and a desired light chain such that when the two heavy chains and two light chains of the heterodimer pair are co-expressed in a cell, the heavy chain of the first heterodimer preferentially pairs with one of the light chains rather than the other (see e.g., WO2015181805). Other exemplary methods are described in WO2016026943 (Argen-X), US20150211001, US20140072581A1, US20160039947A1, and US20150368352.

[0495] Lambda/Kappa Formats

[0496] Multispecific molecules (e.g., multispecific antibody molecules) that include the lambda light chain polypeptide and a kappa light chain polypeptides, can be used to allow for heterodimerization. Methods for generating bispecific antibody molecules comprising the lambda light chain polypeptide and a kappa light chain polypeptides are disclosed in PCT/US17/53053 filed on Sep. 22, 2017, incorporated herein by reference in its entirety.

[0497] In embodiments, the multispecific molecules includes a multispecific antibody molecule, e.g., an antibody molecule comprising two binding specificities, e.g., a bispecific antibody molecule. The multispecific antibody molecule includes:

[0498] a lambda light chain polypeptide 1 (LLCP1) specific for a first epitope;

[0499] a heavy chain polypeptide 1 (HCP1) specific for the first epitope;

[0500] a kappa light chain polypeptide 2 (KLCP2) specific for a second epitope; and

[0501] a heavy chain polypeptide 2 (HCP2) specific for the second epitope.

[0502] “Lambda light chain polypeptide 1 (LLCP1)”, as that term is used herein, refers to a polypeptide comprising sufficient light chain (LC) sequence, such that when combined with a cognate heavy chain variable region, can mediate specific binding to its epitope and complex with an HCP1. In an embodiment it comprises all or a fragment of a CH1 region. In an embodiment, an LLCP1 comprises LC-CDR1, LC-CDR2, LC-CDR3, FR1, FR2, FR3, FR4, and CH1, or sufficient sequence therefrom to mediate specific binding of its epitope and complex with an HCP1. LLCP1, together with its HCP1, provide specificity for a first epitope (while KLCP2, together with its HCP2, provide specificity for a second epitope). As described elsewhere herein, LLCP1 has a higher affinity for HCP1 than for HCP2.

[0503] “Kappa light chain polypeptide 2 (KLCP2)”, as that term is used herein, refers to a polypeptide comprising sufficient light chain (LC) sequence, such that when combined with a cognate heavy chain variable region, can mediate specific binding to its epitope and complex with an HCP2. In an embodiments it comprises all or a fragment of a CH1 region. In an embodiment, a KLCP2 comprises LC-CDR1, LC-CDR2, LC-CDR3, FR1, FR2, FR3, FR4, and CH1, or sufficient sequence therefrom to mediate specific binding of its epitope and complex with an HCP2. KLCP2, together with its HCP2, provide specificity for a second epitope (while LLCP1, together with its HCP1, provide specificity for a first epitope).

[0504] “Heavy chain polypeptide 1 (HCP1)”, as that term is used herein, refers to a polypeptide comprising sufficient heavy chain (HC) sequence, e.g., HC variable region sequence, such that when combined with a cognate LLCP1, can mediate specific binding to its epitope and complex with an HCP1. In an embodiments it comprises all or a fragment of a CH1 region. In an embodiment, it comprises all or a fragment of a CH2 and/or CH3 region. In an embodiment an HCP1 comprises HC-CDR1, HC-CDR2, HC-CDR3, FR1, FR2, FR3, FR4, CH1, CH2, and CH3, or sufficient sequence therefrom to: (i) mediate specific binding of its epitope and complex with an LLCP1, (ii) to complex preferentially, as described herein to LLCP1 as opposed to KLCP2; and (iii) to complex preferentially, as described herein, to an HCP2, as opposed to another molecule of HCP1. HCP1, together with its LLCP1, provide specificity for a first epitope (while KLCP2, together with its HCP2, provide specificity for a second epitope).

[0505] “Heavy chain polypeptide 2 (HCP2)”, as that term is used herein, refers to a polypeptide comprising sufficient heavy chain (HC) sequence, e.g., HC variable region sequence, such that when combined with a cognate LLCP1, can mediate specific binding to its epitope and complex with an HCP1. In an embodiments it comprises all or a fragment of a CH1 region. In an embodiments it comprises all or a fragment of a CH2 and/or CH3 region. In an embodiment an HCP1 comprises HC-CDR1, HC-CDR2, HC-CDR3, FR1, FR2, FR3, FR4, CH1, CH2, and CH3, or sufficient sequence therefrom to: (i) mediate specific binding of its epitope and complex with an KLCP2, (ii) to complex preferentially, as described herein to KLCP2 as opposed to LLCP1; and (iii) to complex preferentially, as described herein, to an HCP1, as opposed to another molecule of HCP2. HCP2, together with its KLCP2, provide specificity for a second epitope (while LLCP1, together with its HCP1, provide specificity for a first epitope).

[0506] In some embodiments of the multispecific antibody molecule disclosed herein:

[0507] LLCP1 has a higher affinity for HCP1 than for HCP2; and/or

[0508] KLCP2 has a higher affinity for HCP2 than for HCP1.

[0509] In embodiments, the affinity of LLCP1 for HCP1 is sufficiently greater than its affinity for HCP2, such that under preselected conditions, e.g., in aqueous buffer, e.g., at pH 7, in saline, e.g., at pH 7, or under physiological conditions, at least 75, 80, 90, 95, 98, 99, 99.5, or 99.9% of the multispecific antibody molecule molecules have a LLCP1 complexed, or interfaced with, a HCP1.

[0510] In some embodiments of the multispecific antibody molecule disclosed herein:

[0511] the HCP1 has a greater affinity for HCP2, than for a second molecule of HCP1; and/or

[0512] the HCP2 has a greater affinity for HCP1, than for a second molecule of HCP2.

[0513] In embodiments, the affinity of HCP1 for HCP2 is sufficiently greater than its affinity for a second molecule of HCP1, such that under preselected conditions, e.g., in aqueous buffer, e.g., at pH 7, in saline, e.g., at pH 7, or under physiological conditions, at least 75%, 80, 90, 95, 98, 99 99.5 or 99.9% of the multispecific antibody molecule molecules have a HCP1 complexed, or interfaced with, a HCP2.

[0514] In another aspect, disclosed herein is a method for making, or producing, a multispecific antibody molecule. The method includes:

(i) providing a first heavy chain polypeptide (e.g., a heavy chain polypeptide comprising one, two, three or all of a first heavy chain variable region (first VH), a first CH1, a first heavy chain constant region (e.g., a first CH2, a first CH3, or both));
(ii) providing a second heavy chain polypeptide (e.g., a heavy chain polypeptide comprising one, two, three or all of a second heavy chain variable region (second VH), a second CH1, a second heavy chain constant region (e.g., a second CH2, a second CH3, or both));
(iii) providing a lambda chain polypeptide (e.g., a lambda light variable region (VLλ), a lambda light constant chain (VLλ), or both) that preferentially associates with the first heavy chain polypeptide (e.g., the first VH); and
(iv) providing a kappa chain polypeptide (e.g., a lambda light variable region (VLκ), a lambda light constant chain (VLκ), or both) that preferentially associates with the second heavy chain polypeptide (e.g., the second VH),
under conditions where (i)-(iv) associate.

[0515] In embodiments, the first and second heavy chain polypeptides form an Fc interface that enhances heterodimerization.

[0516] In embodiments, (i)-(iv) (e.g., nucleic acid encoding (i)-(iv)) are introduced in a single cell, e.g., a single mammalian cell, e.g., a CHO cell. In embodiments, (i)-(iv) are expressed in the cell.

[0517] In embodiments, (i)-(iv) (e.g., nucleic acid encoding (i)-(iv)) are introduced in different cells, e.g., different mammalian cells, e.g., two or more CHO cell. In embodiments, (i)-(iv) are expressed in the cells.

[0518] In one embodiments, the method further comprises purifying a cell-expressed antibody molecule, e.g., using a lambda—and/or—kappa-specific purification, e.g., affinity chromatography.

[0519] In embodiments, the method further comprises evaluating the cell-expressed multispecific antibody molecule. For example, the purified cell-expressed multispecific antibody molecule can be analyzed by techniques known in the art, include mass spectrometry. In one embodiment, the purified cell-expressed antibody molecule is cleaved, e.g., digested with papain to yield the Fab moieties and evaluated using mass spectrometry.

[0520] In embodiments, the method produces correctly paired kappa/lambda multispecific, e.g., bispecific, antibody molecules in a high yield, e.g., at least 75%, 80, 90, 95, 98, 99 99.5 or 99.9%.

[0521] In other embodiments, the multispecific, e.g., a bispecific, antibody molecule that includes:

(i) a first heavy chain polypeptide (HCP1) (e.g., a heavy chain polypeptide comprising one, two, three or all of a first heavy chain variable region (first VH), a first CH1, a first heavy chain constant region (e.g., a first CH2, a first CH3, or both)), e.g., wherein the HCP1 binds to a first epitope;
(ii) a second heavy chain polypeptide (HCP2) (e.g., a heavy chain polypeptide comprising one, two, three or all of a second heavy chain variable region (second VH), a second CH1, a second heavy chain constant region (e.g., a second CH2, a second CH3, or both)), e.g., wherein the HCP2 binds to a second epitope;
(iii) a lambda light chain polypeptide (LLCP1) (e.g., a lambda light variable region (VLl), a lambda light constant chain (VLl), or both) that preferentially associates with the first heavy chain polypeptide (e.g., the first VH), e.g., wherein the LLCP1 binds to a first epitope; and (iv) a kappa light chain polypeptide (KLCP2) (e.g., a lambda light variable region (VLk), a lambda light constant chain (VLk), or both) that preferentially associates with the second heavy chain polypeptide (e.g., the second VH), e.g., wherein the KLCP2 binds to a second epitope.

[0522] In embodiments, the first and second heavy chain polypeptides form an Fc interface that enhances heterodimerization. In embodiments, the multispecific antibody molecule has a first binding specificity that includes a hybrid VL1-CL1 heterodimerized to a first heavy chain variable region connected to the Fc constant, CH2-CH3 domain (having a knob modification) and a second binding specificity that includes a hybrid VLk-CLk heterodimerized to a second heavy chain variable region connected to the Fc constant, CH2-CH3 domain (having a hole modification).

### TCR Beta V Antigen Binding Domains

[0523] Diversity in the immune system enables protection against a huge array of pathogens. Since the germline genome is limited in size, diversity is achieved not only by the process of V(D)J recombination but also by junctional (junctions between V-D and D-J segments) deletion of nucleotides and addition of pseudo-random, non-templated nucleotides. The TCR beta gene undergoes gene arrangement to generate diversity.

[0524] The TCR V beta repertoire varies between individuals and populations because of, e.g., 7 frequently occurring inactivating polymorphisms in functional gene segments and a large insertion/deletion-related polymorphism encompassing 2 V beta gene segments.

[0525] This disclosure provides, inter alia, antibody molecules and fragments thereof, that bind, e.g., specifically bind, to a human TCR beta V chain (TCRβV), e.g., a TCRβV gene family (also referred to as a group), e.g., a TCRβV subfamily (also referred to as a subgroup), e.g., as described herein. TCR beta V families and subfamilies are known in the art, e.g., as described in Yassai et al., (2009) Immunogenetics 61(7) pp: 493-502; Wei S. and Concannon P. (1994) Human Immunology 41(3) pp: 201-206. The antibodies described herein can be recombinant antibodies, e.g., recombinant non-murine antibodies, e.g., recombinant human or humanized antibodies.

[0526] In an aspect, the disclosure provides an anti-TCRβV antibody molecule that binds to human TCRβV, e.g., a TCRβV family, e.g., gene family or a variant thereof. In some embodiments a TCRBV gene family comprises one or more subfamilies, e.g., as described herein, e.g., in FIG. 3, Table 8A or Table 8B. In some embodiments, the TCRβV gene family comprises: a TCRβ V6 subfamily, a TCRβ V10 subfamily, a TCRβ V12 subfamily, a TCRβ V5 subfamily, a TCRβ V7 subfamily, a TCRβ V11 subfamily, a TCRβ V14 subfamily, a TCRβ V16 subfamily, a TCRβ V18 subfamily, a TCRβ V9 subfamily, a TCRβ V13 subfamily, a TCRβ V4 subfamily, a TCRβ V3 subfamily, a TCRβ V2 subfamily, a TCRβ V15 subfamily, a TCRβ V30 subfamily, a TCRβ V19 subfamily, a TCRβ V27 subfamily, a TCRβ V28 subfamily, a TCRβ V24 subfamily, a TCRβ V20 subfamily, TCRβ V25 subfamily, a TCRβ V29 subfamily, a TCRβ V1 subfamily, a TCRβ V17 subfamily, a TCRβ V21 subfamily, a TCRβ V23 subfamily, or a TCRβ V26 subfamily.

[0527] In some embodiments, TCRβ V6 subfamily is also known as TCRβ V13.1. In some embodiments, the TCRβ V6 subfamily comprises: TCRβ V6-4*01, TCRβ V6-4*02, TCRβ V6-9*01, TCRβ V6-8*01, TCRβ V6-5*01, TCRβ V6-6*02, TCRβ V6-6*01, TCRβ V6-2*01, TCRβ V6-3*01 or TCRβ V6-1*01, or a variant thereof. In some embodiments, TCRβ V6 comprises TCRβ V6-4*01, or a variant thereof. In some embodiments, TCRβ V6 comprises TCRβ V6-4*02, or a variant thereof. In some embodiments, TCRβ V6 comprises TCRβ V6-9*01, or a variant thereof. In some embodiments, TCRβ V6 comprises TCRβ V6-8*01, or a variant thereof. In some embodiments, TCRβ V6 comprises TCRβ V6-5*01, or a variant thereof. In some embodiments, TCRβ V6 comprises TCRβ V6-6*02, or a variant thereof. In some embodiments, TCRβ V6 comprises TCRβ V6-6*01, or a variant thereof. In some embodiments, TCRβ V6 comprises TCRβ V6-2*01, or a variant thereof. In some embodiments, TCRβ V6 comprises TCRβ V6-3*01, or a variant thereof. In some embodiments, TCRβ V6 comprises TCRβ V6-1*01, or a variant thereof.

[0528] In some embodiments, TCRβ V6 comprises TCRβ V6-5*01, or a variant thereof. In some embodiments, TCRβ V6, e.g., TCRβ V6-5*01, is recognized, e.g., bound, by SEQ ID NO: 1 and/or SEQ ID NO: 2. In some embodiments, TCRβ V6, e.g., TCRβ V6-5*01, is recognized, e.g., bound, by SEQ ID NO: 9 and/or SEQ ID NO: 10. In some embodiments, TCRβ V6 is recognized, e.g., bound, by SEQ ID NO: 9 and/or SEQ ID NO: 11.

[0529] In some embodiments, TCRβ V10 subfamily is also known as TCRβ V12. In some embodiments, the TCRβ V10 subfamily comprises: TCRβ V10-1*01, TCRβ V10-1*02, TCRβ V10-3*01 or TCRβ V10-2*01, or a variant thereof.

[0530] In some embodiments, TCRβ V12 subfamily is also known as TCRβ V8.1. In some embodiments, the TCRβ V12 subfamily comprises: TCRβ V12-4*01, TCRβ V12-3*01, or TCRβ V12-5*01, or a variant thereof. In some embodiments, TCRβ V12 is recognized, e.g., bound, by SEQ ID NO: 15 and/or SEQ ID NO: 16. In some embodiments, TCRβ V12 is recognized, e.g., bound, by any one of SEQ ID NOs 23-25, and/or any one of SEQ ID NO: 26-30:

[0531] In some embodiments, the TCRβ V5 subfamily is chosen from: TCRβ V5-5*01, TCRβ V5-6*01, TCRβ V5-4*01, TCRβ V5-8*01, TCRβ V5-1*01, or a variant thereof.

[0532] In some embodiments, the TCRβ V7 subfamily comprises TCRβ V7-7*01, TCRβ V7-6*01, TCRβ V7-8*02, TCRβ V7-4*01, TCRβ V7-2*02, TCRβ V7-2*03, TCRβ V7-2*01, TCRβ V7-3*01, TCRβ V7-9*03, or TCRβ V7-9*01, or a variant thereof.

[0533] In some embodiments, the TCRβ V11 subfamily comprises: TCRβ V11-1*01, TCRβ V11-2*01 or TCRβ V11-3*01, or a variant thereof.

[0534] In some embodiments, the TCRβ V14 subfamily comprises TCRβ V14*01, or a variant thereof.

[0535] In some embodiments, the TCRβ V16 subfamily comprises TCRβ V16*01, or a variant thereof.

[0536] In some embodiments, the TCRβ V18 subfamily comprises TCRβ V18*01, or a variant thereof.

[0537] In some embodiments, the TCRβ V9 subfamily comprises TCRβ V9*01 or TCRβ V9*02, or a variant thereof.

[0538] In some embodiments, the TCRβ V13 subfamily comprises TCRβ V13*01, or a variant thereof.

[0539] In some embodiments, the TCRβ V4 subfamily comprises TCRβ V4-2*01, TCRβ V4-3*01, or TCRβ V4-1*01, or a variant thereof.

[0540] In some embodiments, the TCRβ V3 subfamily comprises TCRβ V3-1*01, or a variant thereof.

[0541] In some embodiments, the TCRβ V2 subfamily comprises TCRβ V2*01, or a variant thereof.

[0542] In some embodiments, the TCRβ V15 subfamily comprises TCRβ V15*01, or a variant thereof.

[0543] In some embodiments, the TCRβ V30 subfamily comprises TCRβ V30*01, or TCRβ V30*02, or a variant thereof.

[0544] In some embodiments, the TCRβ V19 subfamily comprises TCRβ V19*01, or TCRβ V19*02, or a variant thereof.

[0545] In some embodiments, the TCRβ V27 subfamily comprises TCRβ V27*01, or a variant thereof.

[0546] In some embodiments, the TCRβ V28 subfamily comprises TCRβ V28*01, or a variant thereof.

[0547] In some embodiments, the TCRβ V24 subfamily comprises TCRβ V24-1*01, or a variant thereof.

[0548] In some embodiments, the TCRβ V20 subfamily comprises TCRβ V20-1*01, or TCRβ V20-1*02, or a variant thereof.

[0549] In some embodiments, the TCRβ V25 subfamily comprises TCRβ V25-1*01, or a variant thereof.

[0550] In some embodiments, the TCRβ V29 subfamily comprises TCRβ V29-1*01, or a variant thereof

TABLE 8A
List of TCRβV subfamilies and subfamily members

| Reference | | |
|---|---|---|
| in FIG. 3 | Subfamily | Subfamily members |
| A | TCRβ V6 | TCRβ V6-4*01, TCRβ V6-4*02, TCRβ V6-9*01, TCRβ V6- |
| | Also referred to | 8*01, TCRβ V6-5*01, TCRβ V6-6*02, TCRβ V6-6*01, TCRβ |
| | as: TCR VB 13.1 | V6-2*01, TCRβ V6-3*01 or TCRβ V6-1*01. |
| B | TCRβ V10 | TCRβ V10-1*01, TCRβ V10-1*02, TCRβ V10-3*01 or TCRβ |
| | Also referred to | V10-2*01 |
| | as: TCRβ V12 | |
| C | TCRβ V12 | TCRβ V12-4*01, TCRβ V12-3*01, or TCRβ V12-5*01 |
| | Also referred to | |
| | as: TCRβ V8.1 | |
| D | TCRβ V5 | TCRβ V5-5*01, TCRβ V5-6*01, TCRβ V5-4*01, TCRβ V5- |
| | | 8*01, TCRβ V5-1*01 |
| E | TCRβ V7 | TCRβ V7-7*01, TCRβ V7-6*01, TCRβ V7-8*02, TCRβ V7- |
| | | 4*01, TCRβ V7-2*02, TCRβ V7-2*03, TCRβ V7-2*01, TCRβ |
| | | V7-3*01, TCRβ V7-9*03, or TCRβ V7-9*01 |
| F | TCRβ V11 | TCRβ V11-1*01, TCRβ V11-2*01 or TCRβ V11-3*01 |
| G | TCRβ V14 | TCRβ V14*01 |
| H | TCRβ V16 | TCRβ V16*01 |
| I | TCRβ V18 | TCRβ V18*01 |
| J | TCRβ V9 | TCRβ V9*01 or TCRβ V9*02 |
| K | TCRβ V13 | TCRβ V13*01 |
| L | TCRβ V4 | TCRβ V4-2*01, TCRβ V4-3*01, or TCRβ V4-1*01 |
| M | TCRβ V3 | TCRβ V3-1*01 |
| N | TCRβ V2 | TCRβ V2*01 |
| O | TCRβ V15 | TCRβ V15*01 |
| P | TCRβ V30 | TCRβ V30*01, or TCRβ V30*02 |
| Q | TCRβ V19 | TCRβ V19*01, or TCRβ V19*02 |
| R | TCRβ V27 | TCRβ V27*01. |
| S | TCRβ V28 | TCRβ V28*01. |
| T | TCRβ V24 | TCRβ V24-1*01 |
| U | TCRβ V20 | TCRβ V20-1*01, or TCRβ V20-1*02 |
| V | TCRβ V25 | TCRβ V25-1*01 |
| W | TCRβ V29 | TCRβ V29-1*01 |

TABLE 8B
Additional TCRβV subfamilies
Subfamily
TCRβ V1
TCRβ V17
TCRβ V21
TCRβ V23
TCRβ V26

### Anti-TCRβV Antibodies

[0551] Disclosed herein, is the discovery of a novel class of antibodies, i.e. anti-TCRβV antibody molecules disclosed herein, which despite having low sequence similarity (e.g., low sequence identity among the different antibody molecules that recognize different TCRβV subfamilies), recognize a structurally conserved region, e.g., domain, on the TCRβV protein and have a similar function (e.g., a similar cytokine profile). Thus, the anti-TCRβV antibody molecules disclosed herein share a structure-function relationship.

[0552] In some embodiments, the anti-TCRβV antibody molecules disclosed herein do not recognize, e.g., bind to, an interface of a TCRβV:TCRalpha complex.

[0553] In some embodiments, the anti-TCRβV antibody molecules disclosed herein do not recognize, e.g., bind to, a constant region of a TCRβV protein. An exemplary antibody that binds to a constant region of a TCRBV region is JOVI.1 as described in Viney et al., (Hybridoma. 1992 December; 11(6):701-13).

[0554] In some embodiments, the anti-TCRβV antibody molecules disclosed herein do not recognize, e.g., bind to, one or more (e.g., all) of a complementarity determining region (e.g., CDR1, CDR2 and/or CDR3) of a TCRβV protein.

[0555] In some embodiments, the anti-TCRβV antibody molecules disclosed herein binds (e.g., specifically binds) to a TCRβV region. In some embodiments, binding of anti-TCRβV antibody molecules disclosed herein results in a cytokine profile that differs from a cytokine profile of a T cell engager that binds to a receptor or molecule other than a TCRβV region (“a non-TCRβV-binding T cell engager”). In some embodiments, the non-TCRβV-binding T cell engager comprises an antibody that binds to a CD3 molecule (e.g., CD3 epsilon (CD3e) molecule); or a TCR alpha (TCRα) molecule. In some embodiments, the non-TCRβV-binding T cell engager is an OKT3 antibody or an SP34-2 antibody.

[0556] In an aspect, the disclosure provides an anti-TCRβV antibody molecule that binds to human TCRβV, e.g., a TCRβV gene family, e.g., one or more of a TCRβV subfamily, e.g., as described herein, e.g., in FIG. 3, Table 8A, or Table 8B. In some embodiments, the anti-TCRβV antibody molecule binds to one or more TCRβV subfamilies chosen from: a TCRβ V6 subfamily, a TCRβ V10 subfamily, a TCRβ V12 subfamily, a TCRβ V5 subfamily, a TCRβ V7 subfamily, a TCRβ V11 subfamily, a TCRβ V14 subfamily, a TCRβ V16 subfamily, a TCRβ V18 subfamily, a TCRβ V9 subfamily, a TCRβ V13 subfamily, a TCRβ V4 subfamily, a TCRβ V3 subfamily, a TCRβ V2 subfamily, a TCRβ V15 subfamily, a TCRβ V30 subfamily, a TCRβ V19 subfamily, a TCRβ V27 subfamily, a TCRβ V28 subfamily, a TCRβ V24 subfamily, a TCRβ V20 subfamily, TCRβ V25 subfamily, a TCRβ V29 subfamily, a TCRβ V1 subfamily, a TCRβ V17 subfamily, a TCRβ V21 subfamily, a TCRβ V23 subfamily, or a TCRβ V26 subfamily, or a variant thereof.

[0557] In some embodiments, the anti-TCRβV antibody molecule binds to a TCRβ V6 subfamily comprising: TCRβ V6-4*01, TCRβ V6-4*02, TCRβ V6-9*01, TCRβ V6-8*01, TCRβ V6-5*01, TCRβ V6-6*02, TCRβ V6-6*01, TCRβ V6-2*01, TCRβ V6-3*01 or TCRβ V6-1*01, or a variant thereof. In some embodiments the TCRβ V6 subfamily comprises TCRβ V6-5*01, or a variant thereof. In some embodiments, TCRβ V6 comprises TCRβ V6-4*01, or a variant thereof. In some embodiments, TCRβ V6 comprises TCRβ V6-4*02, or a variant thereof. In some embodiments, TCRβ V6 comprises TCRβ V6-9*01, or a variant thereof. In some embodiments, TCRβ V6 comprises TCRβ V6-8*01, or a variant thereof. In some embodiments, TCRβ V6 comprises TCRβ V6-5*01, or a variant thereof. In some embodiments, TCRβ V6 comprises TCRβ V6-6*02, or a variant thereof. In some embodiments, TCRβ V6 comprises TCRβ V6-6*01, or a variant thereof. In some embodiments, TCRβ V6 comprises TCRβ V6-2*01, or a variant thereof. In some embodiments, TCRβ V6 comprises TCRβ V6-3*01, or a variant thereof. In some embodiments, TCRβ V6 comprises TCRβ V6-1*01, or a variant thereof.

[0558] In some embodiments, the anti-TCRβV antibody molecule binds to a TCRβ V10 subfamily comprising: TCRβ V10-1*01, TCRβ V10-1*02, TCRβ V10-3*01 or TCRβ V10-2*01, or a variant thereof.

[0559] In some embodiments, the anti-TCRβV antibody molecule binds to a TCRβ V12 subfamily comprising: TCRβ V12-4*01, TCRβ V12-3*01 or TCRβ V12-5*01, or a variant thereof.

[0560] In some embodiments, the anti-TCRβV antibody molecule binds to a TCRβ V5 subfamily comprising: TCRβ V5-5*01, TCRβ V5-6*01, TCRβ V5-4*01, TCRβ V5-8*01, TCRβ V5-1*01, or a variant thereof.

[0561] In some embodiments, the anti-TCRβV antibody molecule does not bind to TCRβ V12, or binds to TCRβ V12 with an affinity and/or binding specificity that is less than (e.g., less than about 10%, 20%, 30%, 40%, 50%, 60%, 70%, 80%, 90% or about 2-, 5-, or 10-fold) the affinity and/or binding specificity of the 16G8 murine antibody or a humanized version thereof as described in U.S. Pat. No. 5,861,155.

[0562] In some embodiments, the anti-TCRβV antibody molecule binds to TCRβ V12 with an affinity and/or binding specificity that is greater than (e.g., greater than about 10%, 20%, 30%, 40%, 50%, 60%, 70%, 80%, 90% or about 2-, 5-, or 10-fold) the affinity and/or binding specificity of the 16G8 murine antibody or a humanized version thereof as described in U.S. Pat. No. 5,861,155.

[0563] In some embodiments, the anti-TCRβV antibody molecule binds to a TCRβV region other than TCRβ V12 (e.g., TCRβV region as described herein, e.g., TCRβ V6 subfamily (e.g., TCRβ V6-5*01) with an affinity and/or binding specificity that is greater than (e.g., greater than about 10%, 20%, 30%, 40%, 50%, 60%, 70%, 80%, 90% or about 2-, 5-, or 10-fold) the affinity and/or binding specificity of the 16G8 murine antibody or a humanized version thereof as described in U.S. Pat. No. 5,861,155.

[0564] In some embodiments, the anti-TCRβV antibody molecule does not bind to TCRβ V5-5*01 or TCRβ V5-1*01, or binds to TCRβ V5-5*01 or TCRβ V5-1*01 with an affinity and/or binding specificity that is less than (e.g., less than about 10%, 20%, 30%, 40%, 50%, 60%, 70%, 80%, 90% or about 2-, 5-, or 10-fold) the affinity and/or binding specificity of murine Antibody C or a humanized version thereof as described in U.S. Pat. No. 5,861,155.

[0565] In some embodiments, the anti-TCRβV antibody molecule binds to TCRβ V5-5*01 or TCRβ V5-1*Ol with an affinity and/or binding specificity that is greater than (e.g., greater than about 10%, 20%, 30%, 40%, 50%, 60%, 70%, 80%, 90% or about 2-, 5-, or 10-fold) the affinity and/or binding specificity of murine Antibody C or a humanized version thereof as described in U.S. Pat. No. 5,861,155.

[0566] In some embodiments, the anti-TCRβV antibody molecule binds to a TCRβV region other than TCRβ V5-5*01 or TCRβ V5-1*01 (e.g., TCRβV region as described herein, e.g., TCRβ V6 subfamily (e.g., TCRβ V6-5*01) with an affinity and/or binding specificity that is greater than (e.g., greater than about 10%, 20%, 30%, 40%, 50%, 60%, 70%, 80%, 90% or about 2-, 5-, or 10-fold) the affinity and/or binding specificity of murine Antibody C or a humanized version thereof as described in U.S. Pat. No. 5,861,155.

### Anti-TCRβ V6 Antibodies

[0567] Accordingly, in one aspect, the disclosure provides an anti-TCRβV antibody molecule that binds to human TCRβ V6, e.g., a TCRβ V6 subfamily comprising: TCRβ V6-4*01, TCRβ V6-4*02, TCRβ V6-9*01, TCRβ V6-8*01, TCRβ V6-5*01, TCRβ V6-6*02, TCRβ V6-6*01, TCRβ V6-2*01, TCRβ V6-3*01 or TCRβ V6-1*01. In some embodiments the TCRβ V6 subfamily comprises TCRβ V6-5*01 or a variant thereof. In some embodiments, TCRβ V6 comprises TCRβ V6-4*01, or a variant thereof. In some embodiments, TCRβ V6 comprises TCRβ V6-4*02, or a variant thereof. In some embodiments, TCRβ V6 comprises TCRβ V6-9*01, or a variant thereof. In some embodiments, TCRβ V6 comprises TCRβ V6-8*01, or a variant thereof. In some embodiments, TCRβ V6 comprises TCRβ V6-5*01, or a variant thereof. In some embodiments, TCRβ V6 comprises TCRβ V6-6*02, or a variant thereof. In some embodiments, TCRβ V6 comprises TCRβ V6-6*01, or a variant thereof. In some embodiments, TCRβ V6 comprises TCRβ V6-2*01, or a variant thereof. In some embodiments, TCRβ V6 comprises TCRβ V6-3*01, or a variant thereof. In some embodiments, TCRβ V6 comprises TCRβ V6-1*01, or a variant thereof.

[0568] In some embodiments, TCRβ V6-5*01 is encoded by the nucleic acid sequence of SEQ ID NO: 43, or a sequence having 85%, 90%, 95%, 99% or more identity thereof.

SEQ ID NO: 43
ATGAGCATCGGCCTCCTGTGCTGTGCAGCCTTGTCTCTCCTGTGGGCAGGT
CCAGTGAATGCTGGTGTCACTCAGACCCCAAAATTCCAGGTCCTGAAGACA
GGACAGAGCATGACACTGCAGTGTGCCCAGGATATGAACCATGAATACATG
TCCTGGTATCGACAAGACCCAGGCATGGGGCTGAGGCTGATTCATTACTCA
GTTGGTGCTGGTATCACTGACCAAGGAGAAGTCCCCAATGGCTACAATGTC
TCCAGATCAACCACAGAGGATTTCCCGCTCAGGCTGCTGTCGGCTGCTCCC
TCCCAGACATCTGTGTACTTCTGTGCCAGCAGTTACTC

[0569] In some embodiments, TCRβ V6-5*01 comprises the amino acid sequence of SEQ ID NO: 44, or an amino acid sequence having 85%, 90%, 95%, 99% or more identity thereof.

SEQ ID NO: 44
MSIGLLCCAALSLLWAGPVNAGVTQTPKFQVLKTGQSMTLQCAQDMNHEYM
SWYRQDPGMGLRLIHYSVGAGITDQGEVPNGYNVSRSTTEDFPLRLLSAAP
SQTSVYFCASSY

[0570] In some embodiments, the anti-TCRβV antibody molecule, e.g., anti-TCRβ V6 (e.g., anti-TCRβ V6-5*01) antibody molecule, is a non-murine antibody molecule, e.g., a human or humanized antibody molecule. In some embodiments, the anti-TCRβV antibody molecule, e.g., anti-TCRβ V6 (e.g., anti-TCRβ V6-5*01) antibody molecule is a human antibody molecule. In some embodiments, the anti-TCRβV antibody molecule, e.g., anti-TCRβ V6 (e.g., anti-TCRβ V6-5*01) antibody molecule is a humanized antibody molecule.

[0571] In some embodiments, the anti-TCRβV antibody molecule, e.g., anti-TCRβ V6 (e.g., anti-TCRβ V6-5*01) antibody molecule, is isolated or recombinant.

[0572] In some embodiments, the anti-TCRβV antibody molecule, e.g., anti-TCRβ V6 (e.g., anti-TCRβ V6-5*01) antibody molecule, comprises at least one antigen-binding region, e.g., a variable region or an antigen-binding fragment thereof, from an antibody described herein, e.g., an antibody chosen from any one of A-H.1 to A-H.68, e.g., A-H.1, A-H.2 or A-H.68, or an antibody described in Table 1A, or encoded by a nucleotide sequence in Table 1A, or a sequence substantially identical (e.g., at least 80%, 85%, 90%, 92%, 95%, 97%, 98%, 99% or higher identical) to any of the aforesaid sequences.

[0573] In some embodiments, the anti-TCRβV antibody molecule, e.g., anti-TCRβ V6 (e.g., anti-TCRβ V6-5*01) antibody molecule, comprises at least one, two, three or four variable regions from an antibody described herein, e.g., an antibody chosen from any one of A-H.1 to A-H.68, e.g., A-H.1, A-H.2 or A-H.68, or an antibody described in Table 1A, or encoded by a nucleotide sequence in Table 1A, or a sequence substantially identical (e.g., at least 80%, 85%, 90%, 92%, 95%, 97%, 98%, 99% or higher identical) to any of the aforesaid sequences.

[0574] In some embodiments, the anti-TCRβV antibody molecule, e.g., anti-TCRβ V6 (e.g., anti-TCRβ V6-5*01) antibody molecule, comprises at least one or two heavy chain variable regions from an antibody described herein, e.g., an antibody chosen from any one of A-H.1 to A-H.68, e.g., A-H.1, A-H.2 or A-H.68, or an antibody molecule described in Table 1A, or encoded by a nucleotide sequence in Table 1A, or a sequence substantially identical (e.g., at least 80%, 85%, 90%, 92%, 95%, 97%, 98%, 99% or higher identical) to any of the aforesaid sequences.

[0575] In some embodiments, the anti-TCRβV antibody molecule comprises a heavy chain variable region (VH) having a consensus sequence of SEQ ID NO: 231 or 3290.

[0576] In some embodiments, the anti-TCRβV antibody molecule, e.g., anti-TCRβ V6 (e.g., anti-TCRβ V6-5*01) antibody molecule, comprises at least one or two light chain variable regions from an antibody described herein, e.g., an antibody chosen from any one of A-H.1 to A-H.68, e.g., A-H.1, A-H.2 or A-H.68, or an antibody described in Table 1A, or encoded by a nucleotide sequence in Table 1A, or a sequence substantially identical (e.g., at least 80%, 85%, 90%, 92%, 95%, 97%, 98%, 99% or higher identical) to any of the aforesaid sequences.

[0577] In some embodiments, the anti-TCRβV antibody molecule comprises a light chain variable region (VL) having a consensus sequence of SEQ ID NO: 230 or 3289.

[0578] In some embodiments, the anti-TCRβV antibody molecule, e.g., anti-TCRβ V6 (e.g., anti-TCRβ V6-5*01) antibody molecule, comprises a heavy chain constant region for an IgG4, e.g., a human IgG4. In still another embodiment, the anti-TCRβV antibody molecule, e.g., anti-TCRβ V6 (e.g., anti-TCRβ V6-5*01) antibody molecule includes a heavy chain constant region for an IgG1, e.g., a human IgG1. In one embodiment, the heavy chain constant region comprises an amino sequence set forth in Table 3A, or a sequence substantially identical (e.g., at least 80%, 85%, 90%, 92%, 95%, 97%, 98%, 99% or higher identical) thereto.

[0579] In some embodiments, the anti-TCRβV antibody molecule, e.g., anti-TCRβ V6 (e.g., anti-TCRβ V6-5*01) antibody molecule, includes a kappa light chain constant region, e.g., a human kappa light chain constant region. In one embodiment, the light chain constant region comprises an amino sequence set forth in Table 3A, or a sequence substantially identical (e.g., at least 80%, 85%, 90%, 92%, 95%, 97%, 98%, 99% or higher identical) thereto.

[0580] In some embodiments, the anti-TCRβV antibody molecule, e.g., anti-TCRβ V6 (e.g., anti-TCRβ V6-5*01) antibody molecule, includes at least one, two, or three complementarity determining regions (CDRs) from a heavy chain variable region (VH) of an antibody described herein, e.g., an antibody chosen from any one of A-H.1 to A-H.68, e.g., A-H.1, A-H.2 or A-H.68, or an antibody described in Table 1A, or encoded by a nucleotide sequence in Table 1A, or a sequence substantially identical (e.g., at least 80%, 85%, 90%, 92%, 95%, 97%, 98%, 99% or higher identical) to any of the aforesaid sequences.

[0581] In some embodiments, the anti-TCRβV antibody molecule, e.g., anti-TCRβ V6 (e.g., anti-TCRβ V6-5*01) antibody molecule, includes at least one, two, or three CDRs (or collectively all of the CDRs) from a heavy chain variable region comprising an amino acid sequence shown in Table 1A, or encoded by a nucleotide sequence shown in Table 1A. In one embodiment, one or more of the CDRs (or collectively all of the CDRs) have one, two, three, four, five, six or more changes, e.g., amino acid substitutions or deletions, relative to the amino acid sequence shown in Table 1A, or encoded by a nucleotide sequence shown in Table 1A.

[0582] In some embodiments, the anti-TCRβV antibody molecule, e.g., anti-TCRβ V6 (e.g., anti-TCRβ V6-5*01) antibody molecule, includes at least one, two, or three complementarity determining regions (CDRs) from a light chain variable region of an antibody described herein, e.g., an antibody chosen from any one of A-H.1 to A-H.68, e.g., A-H.1, A-H.2 or A-H.68, or an antibody described in Table 1A, or encoded by a nucleotide sequence in Table 1A, or a sequence substantially identical (e.g., at least 80%, 85%, 90%, 92%, 95%, 97%, 98%, 99% or higher identical) to any of the aforesaid sequences.

[0583] In some embodiments, the anti-TCRβV antibody molecule, e.g., anti-TCRβ V6 (e.g., anti-TCRβ V6-5*01) antibody molecule, includes at least one, two, or three CDRs (or collectively all of the CDRs) from a light chain variable region comprising an amino acid sequence shown in Table 1A, or encoded by a nucleotide sequence shown in Table 1A. In one embodiment, one or more of the CDRs (or collectively all of the CDRs) have one, two, three, four, five, six or more changes, e.g., amino acid substitutions or deletions, relative to the amino acid sequence shown in Table 1A, or encoded by a nucleotide sequence shown in Table 1A.

[0584] In some embodiments, the anti-TCRβV antibody molecule, e.g., anti-TCRβ V6 (e.g., anti-TCRβ V6-5*01) antibody molecule, includes at least one, two, three, four, five or six CDRs (or collectively all of the CDRs) from a heavy and light chain variable region comprising an amino acid sequence shown in Table 1A, or encoded by a nucleotide sequence shown in Table 1A. In one embodiment, one or more of the CDRs (or collectively all of the CDRs) have one, two, three, four, five, six or more changes, e.g., amino acid substitutions or deletions, relative to the amino acid sequence shown in Table 1A, or encoded by a nucleotide sequence shown in Table 1A.

[0585] In some embodiments, the anti-TCRβV antibody molecule, e.g., anti-TCRβ V6 (e.g., anti-TCRβ V6-5*01) antibody molecule, molecule includes all six CDRs from an antibody described herein, e.g., an antibody chosen from any one of A-H.1 to A-H.68, e.g., A-H.1, A-H.2 or A-H.68, or an antibody described in Table 1A, or encoded by a nucleotide sequence in Table 1A, or closely related CDRs, e.g., CDRs which are identical or which have at least one amino acid alteration, but not more than two, three or four alterations (e.g., substitutions, deletions, or insertions, e.g., conservative substitutions). In some embodiments, the anti-TCRβV antibody molecule, e.g., anti-TCRβ V6 (e.g., anti-TCRβ V6-5*01) antibody molecule, may include any CDR described herein.

[0586] In some embodiments, the anti-TCRβV antibody molecule, e.g., anti-TCRβ V6 (e.g., anti-TCRβ V6-5*01) antibody molecule includes at least one, two, or three CDRs according to Kabat et al. (e.g., at least one, two, or three CDRs according to the Kabat definition as set out in Table 1A) from a heavy chain variable region of an antibody described herein, e.g., an antibody chosen from any one of A-H.1 to A-H.68, e.g., A-H.1, A-H.2 or A-H.68, or an antibody described in Table 1A, or a sequence substantially identical (e.g., at least 80%, 85%, 90%, 92%, 95%, 97%, 98%, 99% or higher identical) to any of the aforesaid sequences; or which have at least one amino acid alteration, but not more than two, three or four alterations (e.g., substitutions, deletions, or insertions, e.g., conservative substitutions) relative to one, two, or three CDRs according to Kabat et al. shown in Table 1A.

[0587] In some embodiments, the anti-TCRβV antibody molecule, e.g., anti-TCRβ V6 (e.g., anti-TCRβ V6-5*01) antibody molecule includes at least one, two, or three CDRs according to Kabat et al. (e.g., at least one, two, or three CDRs according to the Kabat definition as set out in Table 1A) from a light chain variable region of an antibody described herein, e.g., an antibody chosen from any one of A-H.1 to A-H.68, e.g., A-H.1, A-H.2 or A-H.68, or an antibody described in Table 1A, or a sequence substantially identical (e.g., at least 80%, 85%, 90%, 92%, 95%, 97%, 98%, 99% or higher identical) to any of the aforesaid sequences; or which have at least one amino acid alteration, but not more than two, three or four alterations (e.g., substitutions, deletions, or insertions, e.g., conservative substitutions) relative to one, two, or three CDRs according to Kabat et al. shown in Table 1A.

[0588] In some embodiments, the anti-TCRβV antibody molecule, e.g., anti-TCRβ V6 (e.g., anti-TCRβ V6-5*01) antibody molecule, includes at least one, two, three, four, five, or six CDRs according to Kabat et al. (e.g., at least one, two, three, four, five, or six CDRs according to the Kabat definition as set out in Table 1A) from the heavy and light chain variable regions of an antibody described herein, e.g., an antibody chosen from any one of A-H.1 to A-H.68, e.g., A-H.1, A-H.2 or A-H.68, or an antibody described in Table 1A, or encoded by a nucleotide sequence in Table 1A; or a sequence substantially identical (e.g., at least 80%, 85%, 90%, 92%, 95%, 97%, 98%, 99% or higher identical) to any of the aforesaid sequences; or which have at least one amino acid alteration, but not more than two, three or four alterations (e.g., substitutions, deletions, or insertions, e.g., conservative substitutions) relative to one, two, three, four, five, or six CDRs according to Kabat et al. shown in Table 1A.

[0589] In some embodiments, the anti-TCRβV antibody molecule, e.g., anti-TCRβ V6 (e.g., anti-TCRβ V6-5*01) antibody molecule, includes all six CDRs according to Kabat et al. (e.g., all six CDRs according to the Kabat definition as set out in Table 1A) from the heavy and light chain variable regions of an antibody described herein, e.g., an antibody chosen from any one of A-H.1 to A-H.68, e.g., A-H.1, A-H.2 or A-H.68, or an antibody described in Table 1A, or encoded by a nucleotide sequence in Table 1A; or a sequence substantially identical (e.g., at least 80%, 85%, 90%, 92%, 95%, 97%, 98%, 99% or higher identical) to any of the aforesaid sequences; or which have at least one amino acid alteration, but not more than two, three or four alterations (e.g., substitutions, deletions, or insertions, e.g., conservative substitutions) relative to all six CDRs according to Kabat et al. shown in Table 1A. In one embodiment, the anti-TCRβV antibody molecule, e.g., anti-TCRβ V6 (e.g., anti-TCRβ V6-5*01) antibody molecule, may include any CDR described herein.

[0590] In some embodiments, the anti-TCRβV antibody molecule, e.g., anti-TCRβ V6 (e.g., anti-TCRβ V6-5*01) antibody molecule, includes at least one, two, or three hypervariable loops that have the same canonical structures as the corresponding hypervariable loop of an antibody described herein, e.g., an antibody chosen from chosen from any one of A-H.1 to A-H.68, e.g., A-H.1, A-H.2 or A-H.68, e.g., the same canonical structures as at least loop 1 and/or loop 2 of the heavy and/or light chain variable domains of an antibody described herein. See, e.g., Chothia et al., (1992) J. Mol. Biol. 227:799-817; Tomlinson et al., (1992) J. Mol. Biol. 227:776-798 for descriptions of hypervariable loop canonical structures. These structures can be determined by inspection of the tables described in these references.

[0591] In some embodiments, the anti-TCRβV antibody molecule, e.g., anti-TCRβ V6 (e.g., anti-TCRβ V6-5*01) antibody molecule includes at least one, two, or three CDRs according to Chothia et al. (e.g., at least one, two, or three CDRs according to the Chothia definition as set out in Table 1A) from a heavy chain variable region of an antibody described herein, e.g., an antibody chosen from any one of A-H.1 to A-H.68, e.g., A-H.1, A-H.2 or A-H.68, or as described in Table 1A, or a sequence substantially identical (e.g., at least 80%, 85%, 90%, 92%, 95%, 97%, 98%, 99% or higher identical) to any of the aforesaid sequences; or which have at least one amino acid alteration, but not more than two, three or four alterations (e.g., substitutions, deletions, or insertions, e.g., conservative substitutions) relative to one, two, or three CDRs according to Chothia et al. shown in Table 1A.

[0592] In some embodiments, the anti-TCRβV antibody molecule, e.g., anti-TCRβ V6 (e.g., anti-TCRβ V6-5*01) antibody molecule includes at least one, two, or three CDRs according to Chothia et al. (e.g., at least one, two, or three CDRs according to the Chothia definition as set out in Table 1A) from a light chain variable region of an antibody described herein, e.g., an antibody chosen from any one of A-H.1 to A-H.68, e.g., A-H.1, A-H.2 or A-H.68, or an antibody described in Table 1A, or a sequence substantially identical (e.g., at least 80%, 85%, 90%, 92%, 95%, 97%, 98%, 99% or higher identical) to any of the aforesaid sequences; or which have at least one amino acid alteration, but not more than two, three or four alterations (e.g., substitutions, deletions, or insertions, e.g., conservative substitutions) relative to one, two, or three CDRs according to Chothia et al. shown in Table 1A.

[0593] In some embodiments, the anti-TCRβV antibody molecule, e.g., anti-TCRβ V6 (e.g., anti-TCRβ V6-5*01) antibody molecule, includes at least one, two, three, four, five, or six CDRs according to Chothia et al. (e.g., at least one, two, three, four, five, or six CDRs according to the Chothia definition as set out in Table 1A) from the heavy and light chain variable regions of an antibody described herein, e.g., an antibody chosen from any one of A-H.1 to A-H.68, e.g., A-H.1, A-H.2 or A-H.68, or an antibody described in Table 1A, or encoded by the nucleotide sequence in Table 1A; or a sequence substantially identical (e.g., at least 80%, 85%, 90%, 92%, 95%, 97%, 98%, 99% or higher identical) to any of the aforesaid sequences; or which have at least one amino acid alteration, but not more than two, three or four alterations (e.g., substitutions, deletions, or insertions, e.g., conservative substitutions) relative to one, two, three, four, five, or six CDRs according to Chothia et al. shown in Table 1A.

[0594] In some embodiments, the anti-TCRβV antibody molecule, e.g., anti-TCRβ V6 (e.g., anti-TCRβ V6-5*01) antibody molecule, includes all six CDRs according to Chothia et al. (e.g., all six CDRs according to the Chothia definition as set out in Table 1A) from the heavy and light chain variable regions of an antibody described herein, e.g., an antibody chosen from any one of A-H.1 to A-H.68, e.g., A-H.1, A-H.2 or A-H.68, or an antibody described in Table 1A, or encoded by a nucleotide sequence in Table 1A; or a sequence substantially identical (e.g., at least 80%, 85%, 90%, 92%, 95%, 97%, 98%, 99% or higher identical) to any of the aforesaid sequences; or which have at least one amino acid alteration, but not more than two, three or four alterations (e.g., substitutions, deletions, or insertions, e.g., conservative substitutions) relative to all six CDRs according to Chothia et al. shown in Table 1A. In one embodiment, the anti-TCRβ V antibody molecule, e.g., anti-TCRβ V6 (e.g., anti-TCRβ V6-5*01) antibody molecule, may include any CDR described herein.

[0595] In some embodiments, the anti-TCRβV antibody molecule, e.g., anti-TCRβ V6 (e.g., anti-TCRβ V6-5*01) antibody molecule, molecule includes a combination of CDRs or hypervariable loops defined according to Kabat et al., Chothia et al., or as described in Table 1A.

[0596] In some embodiments, the anti-TCRβV antibody molecule, e.g., anti-TCRβ V6 (e.g., anti-TCRβ V6-5*01) antibody molecule, can contain any combination of CDRs or hypervariable loops according to the Kabat and Chothia definitions.

[0597] In some embodiments, a combined CDR as set out in Table 1A is a CDR that comprises a Kabat CDR and a Chothia CDR.

[0598] In some embodiments, the anti-TCRβV antibody molecule, e.g., anti-TCRβ V6 (e.g., anti-TCRβ V6-5*01) antibody molecule, molecule includes a combination of CDRs or hypervariable loops identified as combined CDRs in Table 1A. In some embodiments, the anti-TCRβ V antibody molecule, e.g., anti-TCRβ V6 (e.g., anti-TCRβ V6-5*01) antibody molecule, can contain any combination of CDRs or hypervariable loops according the “combined” CDRs are described in Table 1A.

[0599] In an embodiment, e.g., an embodiment comprising a variable region, a CDR (e.g., a combined CDR, Chothia CDR or Kabat CDR), or other sequence referred to herein, e.g., in Table 1A, the antibody molecule is a monospecific antibody molecule, a bispecific antibody molecule, a bivalent antibody molecule, a biparatopic antibody molecule, or an antibody molecule that comprises an antigen binding fragment of an antibody, e.g., a half antibody or antigen binding fragment of a half antibody. In certain embodiments the antibody molecule comprises a multispecific molecule, e.g., a bispecific molecule, e.g., as described herein.

[0600] In an embodiment, the anti-TCRβV antibody molecule, e.g., anti-TCRβ V6 (e.g., anti-TCRβ V6-5*01) antibody molecule includes:

(i) one, two or all of a light chain complementarity determining region 1 (LC CDR1), a light chain complementarity determining region 2 (LC CDR2), and a light chain complementarity determining region 3 (LC CDR3) of SEQ ID NO: 2, SEQ ID NO: 10 or SEQ ID NO: 11, and/or
(ii) one, two or all of a heavy chain complementarity determining region 1 (HC CDR1), heavy chain complementarity determining region 2 (HC CDR2), and a heavy chain complementarity determining region 3 (HC CDR3) of SEQ ID NO: 1 or SEQ ID NO: 9.

[0601] In some embodiments, the anti-TCRβV antibody molecule, e.g., anti-TCRβ V6 (e.g., anti-TCRβ V6-5*01) antibody molecule comprises a LC CDR1, LC CDR2, and LC CDR3 of SEQ ID NO: 2, and a HC CDR1, HC CDR2, and HC CDR3 of SEQ ID NO: 1.

[0602] In some embodiments the anti-TCRβV antibody molecule, e.g., anti-TCRβ V6 (e.g., anti-TCRβ V6-5*01) antibody molecule comprises a LC CDR1, LC CDR2, and LC CDR3 of SEQ ID NO: 10, and a HC CDR1, HC CDR2, and HC CDR3 of SEQ ID NO: 9.

[0603] In some embodiments, the anti-TCRβV antibody molecule, e.g., anti-TCRβ V6 (e.g., anti-TCRβ V6-5*01) antibody molecule comprises a LC CDR1, LC CDR2, and LC CDR3 of SEQ ID NO: 11, and a HC CDR1, HC CDR2, and HC CDR3 of SEQ ID NO: 9.

[0604] In an embodiment, the anti-TCRβV antibody molecule, e.g., anti-TCRβ V6 (e.g., anti-TCRβ V6-5*01) antibody molecule comprises:

(i) a LC CDR1 amino acid sequence of SEQ ID NO: 6, a LC CDR2 amino acid sequence of SEQ ID NO: 7, or a LC CDR3 amino acid sequence of SEQ ID NO: 8; and/or
(ii) a HC CDR1 amino acid sequence of SEQ ID NO: 3, a HC CDR2 amino acid sequence of SEQ ID NO: 4, or a HC CDR3 amino acid sequence of SEQ ID NO: 5.

[0605] In some embodiments, the anti-TCRβV antibody molecule, e.g., anti-TCRβ V6 (e.g., anti-TCRβ V6-5*01) antibody molecule comprises:

(i) a light chain variable region (VL) comprising a LC CDR1 amino acid sequence of SEQ ID NO: 6, a LC CDR2 amino acid sequence of SEQ ID NO: 7, or a LC CDR3 amino acid sequence of SEQ ID NO: 8; and/or
(ii) a heavy chain variable region (VH) comprising a HC CDR1 amino acid sequence of SEQ ID NO: 3, a HC CDR2 amino acid sequence of SEQ ID NO: 4, or a HC CDR3 amino acid sequence of SEQ ID NO: 5.

[0606] In an embodiment, the anti-TCRβV antibody molecule, e.g., anti-TCRβ V6 (e.g., anti-TCRβ V6-5*01) antibody molecule comprises:

(i) a LC CDR1 amino acid sequence of SEQ ID NO: 51, a LC CDR2 amino acid sequence of SEQ ID NO: 52, or a LC CDR3 amino acid sequence of SEQ ID NO: 53; and/or
(ii) a HC CDR1 amino acid sequence of SEQ ID NO: 45, a HC CDR2 amino acid sequence of SEQ ID NO: 46, or a HC CDR3 amino acid sequence of SEQ ID NO: 47.

[0607] In some embodiments, the anti-TCRβV antibody molecule, e.g., anti-TCRβ V6 (e.g., anti-TCRβ V6-5*01) antibody molecule comprises:

(i) a light chain variable region (VL) comprising a LC CDR1 amino acid sequence of SEQ ID NO: 51, a LC CDR2 amino acid sequence of SEQ ID NO: 52, or a LC CDR3 amino acid sequence of SEQ ID NO: 53; and/or
(ii) a heavy chain variable region (VH) comprising a HC CDR1 amino acid sequence of SEQ ID NO: 45, a HC CDR2 amino acid sequence of SEQ ID NO: 46, or a HC CDR3 amino acid sequence of SEQ ID NO: 47.

[0608] In an embodiment, the anti-TCRβV antibody molecule, e.g., anti-TCRβ V6 (e.g., anti-TCRβ V6-5*01) antibody molecule comprises:

(i) a LC CDR1 amino acid sequence of SEQ ID NO: 54, a LC CDR2 amino acid sequence of SEQ ID NO: 55, or a LC CDR3 amino acid sequence of SEQ ID NO: 56; and/or
(ii) a HC CDR1 amino acid sequence of SEQ ID NO: 48, a HC CDR2 amino acid sequence of SEQ ID NO: 49, or a HC CDR3 amino acid sequence of SEQ ID NO: 50.

[0609] In some embodiments, the anti-TCRβV antibody molecule, e.g., anti-TCRβ V6 (e.g., anti-TCRβ V6-5*01) antibody molecule comprises:

(i) a light chain variable region (VL) comprising a LC CDR1 amino acid sequence of SEQ ID NO: 54, a LC CDR2 amino acid sequence of SEQ ID NO: 55, or a LC CDR3 amino acid sequence of SEQ ID NO: 56; and/or
(ii) a heavy chain variable region (VH) comprising a HC CDR1 amino acid sequence of SEQ ID NO: 48, a HC CDR2 amino acid sequence of SEQ ID NO: 49, or a HC CDR3 amino acid sequence of SEQ ID NO: 50.

[0610] In one embodiment, the light or the heavy chain variable framework (e.g., the region encompassing at least FR1, FR2, FR3, and optionally FR4) of the anti-TCRβV antibody molecule, e.g., anti-TCRβ V6 (e.g., anti-TCRβ V6-5*01) antibody molecule can be chosen from: (a) a light or heavy chain variable framework including at least 80%, 85%, 87% 90%, 92%, 93%, 95%, 97%, 98%, or 100% of the amino acid residues from a human light or heavy chain variable framework, e.g., a light or heavy chain variable framework residue from a human mature antibody, a human germline sequence, or a human consensus sequence; (b) a light or heavy chain variable framework including from 20% to 80%, 40% to 60%, 60% to 90%, or 70% to 95% of the amino acid residues from a human light or heavy chain variable framework, e.g., a light or heavy chain variable framework residue from a human mature antibody, a human germline sequence, or a human consensus sequence; (c) a non-human framework (e.g., a rodent framework); or (d) a non-human framework that has been modified, e.g., to remove antigenic or cytotoxic determinants, e.g., deimmunized, or partially humanized. In one embodiment, the light or heavy chain variable framework region (particularly FR1, FR2 and/or FR3) includes a light or heavy chain variable framework sequence at least 70, 75, 80, 85, 87, 88, 90, 92, 94, 95, 96, 97, 98, 99% identical or identical to the frameworks of a VL or VH segment of a human germline gene.

[0611] In some embodiments, the anti-TCRβV antibody molecule, e.g., anti-TCRβ V6 (e.g., anti-TCRβ V6-5*01) antibody molecule, comprises a heavy chain variable domain having at least one, two, three, four, five, six, seven, ten, fifteen, twenty or more changes, e.g., amino acid substitutions or deletions, from an amino acid sequence of any one of A-H.1 to A-H.68, e.g., A-H.1, A-H.2 or A-H.68, e.g., the amino acid sequence of the FR region in the entire variable region, e.g., shown in FIG. 1A, or in SEQ ID NO: 9.

[0612] Alternatively, or in combination with the heavy chain substitutions described herein, the anti-TCRβV antibody molecule, e.g., anti-TCRβ V6 (e.g., anti-TCRβ V6-5*01) antibody molecule, comprises a light chain variable domain having at least one, two, three, four, five, six, seven, ten, fifteen, twenty or more amino acid changes, e.g., amino acid substitutions or deletions, from an amino acid sequence of any one of A-H.1 to A-H.68, e.g., A-H.1, A-H.2 or A-H.68, e.g., the amino acid sequence of the FR region in the entire variable region, e.g., shown in FIG. 1B, or in SEQ ID NO: 10 or SEQ ID NO: 11.

[0613] In some embodiments, the anti-TCRβV antibody molecule, e.g., anti-TCRβ V6 (e.g., anti-TCRβ V6-5*01) antibody molecule, includes one, two, three, or four heavy chain framework regions shown in FIG. 1A, or a sequence substantially identical thereto.

[0614] In some embodiments, the anti-TCRβV antibody molecule, e.g., anti-TCRβ V6 (e.g., anti-TCRβ V6-5*01) antibody molecule, includes one, two, three, or four light chain framework regions shown in FIG. 1B, or a sequence substantially identical thereto.

[0615] In some embodiments, the anti-TCRβV antibody molecule, e.g., anti-TCRβ V6 (e.g., anti-TCRβ V6-5*01) antibody molecule, comprises the light chain framework region 1 of A-H.1 or A-H.2, e.g., as shown in FIG. 1B.

[0616] In some embodiments, the anti-TCRβV antibody molecule, e.g., anti-TCRβ V6 (e.g., anti-TCRβ V6-5*01) antibody molecule, comprises the light chain framework region 2 of A-H.1 or A-H.2, e.g., as shown in FIG. 1B.

[0617] In some embodiments, the anti-TCRβV antibody molecule, e.g., anti-TCRβ V6 (e.g., anti-TCRβ V6-5*01) antibody molecule, comprises the light chain framework region 3 of A-H.1 or A-H.2, e.g., as shown in FIG. 1B.

[0618] In some embodiments, the anti-TCRβV antibody molecule, e.g., anti-TCRβ V6 (e.g., anti-TCRβ V6-5*01) antibody molecule, comprises the light chain framework region 4 of A-H.1 or A-H.2, e.g., as shown in FIG. 1B.

[0619] In some embodiments, the anti-TCRβV antibody molecule, e.g., anti-TCRβ V6 (e.g., anti-TCRβ V6-5*01) antibody molecule, comprises a light chain variable domain comprising a framework region, e.g., framework region 1 (FR1), comprising a change, e.g., a substitution (e.g., a conservative substitution) at position 10 according to Kabat numbering. In some embodiments, the FR1 comprises a Phenylalanine at position 10, e.g., a Serine to Phenyalanine substitution. In some embodiments, the substitution is relative to a human germline light chain framework region sequence.

[0620] In some embodiments, the anti-TCRβV antibody molecule, e.g., anti-TCRβ V6 (e.g., anti-TCRβ V6-5*01) antibody molecule, comprises a light chain variable domain comprising a framework region, e.g., framework region 2 (FR2), comprising a change, e.g., a substitution (e.g., a conservative substitution) at a position disclosed herein according to Kabat numbering. In some embodiments, FR2 comprises a Histidine at position 36, e.g., a substitution at position 36 according to Kabat numbering, e.g., a Tyrosine to Histidine substitution. In some embodiments, FR2 comprises an Alanine at position 46, e.g., a substitution at position 46 according to Kabat numbering, e.g., an Arginine to Alanine substitution. In some embodiments, the substitution is relative to a human germline light chain framework region sequence.

[0621] In some embodiments, the anti-TCRβV antibody molecule, e.g., anti-TCRβ V6 (e.g., anti-TCRβ V6-5*01) antibody molecule, comprises a light chain variable domain comprising a framework region, e.g., framework region 3 (FR3), comprising a change, e.g., a substitution (e.g., a conservative substitution) at a position disclosed herein according to Kabat numbering. In some embodiments, FR3 comprises a Phenyalanine at position 87, e.g., a substitution at position 87 according to Kabat numbering, e.g., a Tyrosine to Phenyalanine substitution. In some embodiments, the substitution is relative to a human germline light chain framework region sequence.

[0622] In some embodiments, the anti-TCRβV antibody molecule, e.g., anti-TCRβ V6 (e.g., anti-TCRβ V6-5*01) antibody molecule, comprises a light chain variable domain comprising: (a) a framework region 1 (FR1) comprising a Phenylalanine at position 10, e.g., a substitution at position 10 according to Kabat numbering, e.g., a Serine to Phenyalanine substitution; (b) a framework region 2 (FR2) comprising a Histidine at position 36, e.g., a substitution at position 36 according to Kabat numbering, e.g., a Tyrosine to Histidine substitution, and a Alanine at position 46, e.g., a substitution at position 46 according to Kabat numbering, e.g., a Arginine to Alanine substitution; and (c) a framework region 3 (FR3) comprising a Phenylalanine at position 87, e.g., a substitution at position 87 according to Kabat numbering, e.g., a Tyrosine to Phenyalanine substitution, e.g., as shown in the amino acid sequence of SEQ ID NO: 10. In some embodiments, the substitution is relative to a human germline light chain framework region sequence.

[0623] In some embodiments, the anti-TCRβV antibody molecule, e.g., anti-TCRβ V6 (e.g., anti-TCRβ V6-5*01) antibody molecule, comprises a light chain variable domain comprising: (a) a framework region 2 (FR2) comprising a Histidine at position 36, e.g., a substitution at position 36 according to Kabat numbering, e.g., a Tyrosine to Histidine substitution, and a Alanine at position 46, e.g., a substitution at position 46 according to Kabat numbering, e.g., a Arginine to Alanine substitution; and (b) a framework region 3 (FR3) comprising a Phenylalanine at position 87, e.g., a substitution at position 87 according to Kabat numbering, e.g., a Tyrosine to Phenyalanine substitution, e.g., as shown in the amino acid sequence of SEQ ID NO: 11. In some embodiments, the substitution is relative to a human germline light chain framework region sequence.

[0624] In some embodiments, the anti-TCRβV antibody molecule, e.g., anti-TCRβ V6 (e.g., anti-TCRβ V6-5*01) antibody molecule, comprises a light chain variable domain comprising: (a) a framework region 1 (FR1) comprising a change, e.g., a substitution (e.g., a conservative substitution) at one or more (e.g., all) positions disclosed herein according to Kabat numbering, (b) a framework region 2 (FR2) comprising a change, e.g., a substitution (e.g., a conservative substitution) at one or more (e.g., all) position disclosed herein according to Kabat numbering and (c) a framework region 3 (FR3) comprising a change, e.g., a substitution (e.g., a conservative substitution) at one or more (e.g., all) position disclosed herein according to Kabat numbering. In some embodiments, the substitution is relative to a human germline light chain framework region sequence.

[0625] In some embodiments, the anti-TCRβV antibody molecule, e.g., anti-TCRβ V6 (e.g., anti-TCRβ V6-5*01) antibody molecule, comprises the heavy chain framework region 1 of A-H.1 or A-H.2, e.g., as shown in FIG. 1A.

[0626] In some embodiments, the anti-TCRβV antibody molecule, e.g., anti-TCRβ V6 (e.g., anti-TCRβ V6-5*01) antibody molecule, comprises the heavy chain framework region 2 of A-H.1 or A-H.2, e.g., as shown in FIG. 1A

[0627] In some embodiments, the anti-TCRβV antibody molecule, e.g., anti-TCRβ V6 (e.g., anti-TCRβ V6-5*01) antibody molecule, comprises the heavy chain framework region 3 of A-H.1 or A-H.2, e.g., as shown in FIG. 1A.

[0628] In some embodiments, the anti-TCRβV antibody molecule, e.g., anti-TCRβ V6 (e.g., anti-TCRβ V6-5*01) antibody molecule, comprises the heavy chain framework region 4 of A-H.1 or A-H.2, e.g., as shown in FIG. 1A.

[0629] In some embodiments, the anti-TCRβV antibody molecule, e.g., anti-TCRβ V6 (e.g., anti-TCRβ V6-5*01) antibody molecule, comprises a heavy chain variable domain comprising a framework region, e.g., framework region 3 (FR3), comprising a change, e.g., a substitution (e.g., a conservative substitution) at a position disclosed herein according to Kabat numbering. In some embodiments, FR3 comprises a Threonine at position 73, e.g., a substitution at position 73 according to Kabat numbering, e.g., a Glutamic Acid to Threonine substitution. In some embodiments, FR3 comprises a Glycine at position 94, e.g., a substitution at position 94 according to Kabat numbering, e.g., an Arginine to Glycine substitution. In some embodiments, the substitution is relative to a human germline heavy chain framework region sequence.

[0630] In some embodiments, the anti-TCRβV antibody molecule, e.g., anti-TCRβ V6 (e.g., anti-TCRβ V6-5*01) antibody molecule, comprises a heavy chain variable domain comprising a framework region 3 (FR3) comprising a Threonine at position 73, e.g., a substitution at position 73 according to Kabat numbering, e.g., a Glutamic Acid to Threonine substitution, and a Glycine at position 94, e.g., a substitution at position 94 according to Kabat numbering, e.g., a Arginine to Glycine substitution, e.g., as shown in the amino acid sequence of SEQ ID NO: 10.

[0631] In some embodiments, the anti-TCRβV antibody molecule, e.g., anti-TCRβ V6 (e.g., anti-TCRβ V6-5*01) antibody molecule, comprises the heavy chain framework regions 1-4 of A-H.1 or A-H.2, e.g., SEQ ID NO: 9, or as shown in FIGS. 1A and 1B.

[0632] In some embodiments, the anti-TCRβV antibody molecule, e.g., anti-TCRβ V6 (e.g., anti-TCRβ V6-5*01) antibody molecule, comprises the light chain framework regions 1-4 of A-H.1, e.g., SEQ ID NO: 10, or as shown in FIGS. 1A and 1B.

[0633] In some embodiments, the anti-TCRβV antibody molecule, e.g., anti-TCRβ V6 (e.g., anti-TCRβ V6-5*01) antibody molecule, comprises the light chain framework regions 1-4 of A-H.2, e.g., SEQ ID NO: 11, or as shown in FIGS. 1A and 1B.

[0634] In some embodiments, the anti-TCRβV antibody molecule, e.g., anti-TCRβ V6 (e.g., anti-TCRβ V6-5*01) antibody molecule, comprises the heavy chain framework regions 1-4 of A-H.1, e.g., SEQ ID NO: 9; and the light chain framework regions 1-4 of A-H.1, e.g., SEQ ID NO: 10, or as shown in FIGS. 1A and 1B.

[0635] In some embodiments, the anti-TCRβV antibody molecule, e.g., anti-TCRβ V6 (e.g., anti-TCRβ V6-5*01) antibody molecule, comprises the heavy chain framework regions 1-4 of A-H.2, e.g., SEQ ID NO: 9; and the light chain framework regions 1-4 of A-H.2, e.g., SEQ ID NO: 11, or as shown in FIGS. 1A and 1B.

[0636] In some embodiments, the heavy or light chain variable domain, or both, of the anti-TCRβ V antibody molecule, e.g., anti-TCRβ V6 (e.g., anti-TCRβ V6-5*01) antibody molecule, includes an amino acid sequence, which is substantially identical to an amino acid disclosed herein, e.g., at least 80%, 85%, 90%, 92%, 95%, 97%, 98%, 99% or higher identical to a variable region of an antibody described herein, e.g., an antibody chosen from any one of A-H.1 to A-H.68, e.g., A-H.1, A-H.2 or A-H.68, or as described in Table 1A, or encoded by the nucleotide sequence in Table 1A; or which differs at least 1 or 5 residues, but less than 40, 30, 20, or 10 residues, from a variable region of an antibody described herein.

[0637] In some embodiments, the anti-TCRβV antibody molecule, e.g., anti-TCRβ V6 (e.g., anti-TCRβ V6-5*01) antibody molecule, comprises at least one, two, three, or four antigen-binding regions, e.g., variable regions, having an amino acid sequence as set forth in Table 1A, or a sequence substantially identical thereto (e.g., a sequence at least about 85%, 90%, 95%, 99% or more identical thereto, or which differs by no more than 1, 2, 5, 10, or 15 amino acid residues from the sequences shown in Table 1A. In another embodiment, the anti-TCRβV antibody molecule, e.g., anti-TCRβ V6 (e.g., anti-TCRβ V6-5*01) antibody molecule includes a VH and/or VL domain encoded by a nucleic acid having a nucleotide sequence as set forth in Table 1A, or a sequence substantially identical thereto (e.g., a sequence at least about 85%, 90%, 95%, 99% or more identical thereto, or which differs by no more than 3, 6, 15, 30, or 45 nucleotides from the sequences shown in Table 1A.

[0638] In some embodiments, the anti-TCRβV antibody molecule, e.g., anti-TCRβ V6 (e.g., anti-TCRβ V6-5*01) antibody molecule, comprises:

a VH domain comprising the amino acid sequence of SEQ ID NO: 9, an amino acid sequence at least about 85%, 90%, 95%, 99% or more identical to the amino acid sequence of SEQ ID NO: 9, or an amino acid sequence which differs by no more than 1, 2, 5, 10, or 15 amino acid residues from the amino acid sequence of SEQ ID NO: 9; and/or a VL domain comprising the amino acid sequence of SEQ ID NO: 10, an amino acid sequence at least about 85%, 90%, 95%, 99% or more identical to the amino acid sequence of SEQ ID NO: 10, or an amino acid sequence which differs by no more than 1, 2, 5, 10, or 15 amino acid residues from the amino acid sequence of SEQ ID NO: 10.

[0639] In some embodiments, the anti-TCRβV antibody molecule, e.g., anti-TCRβ V6 (e.g., anti-TCRβ V6-5*01) antibody molecule, comprises:

a VH domain comprising the amino acid sequence of SEQ ID NO: 9, an amino acid sequence at least about 85%, 90%, 95%, 99% or more identical to the amino acid sequence of SEQ ID NO: 9, or an amino acid sequence which differs by no more than 1, 2, 5, 10, or 15 amino acid residues from the amino acid sequence of SEQ ID NO: 9; and/or a VL domain comprising the amino acid sequence of SEQ ID NO: 11, an amino acid sequence at least about 85%, 90%, 95%, 99% or more identical to the amino acid sequence of SEQ ID NO: 11, or an amino acid sequence which differs by no more than 1, 2, 5, 10, or 15 amino acid residues from the amino acid sequence of SEQ ID NO: 11.

[0640] In some embodiments, the anti-TCRβV antibody molecule, e.g., anti-TCRβ V6 (e.g., anti-TCRβ V6-5*01) antibody molecule is a full antibody or fragment thereof (e.g., a Fab, F(ab′)₂, Fv, or a single chain Fv fragment (scFv)). In embodiments, the anti-TCRβV antibody molecule, e.g., anti-TCRβ V6 (e.g., anti-TCRβ V6-5*01) antibody molecule is a monoclonal antibody or an antibody with single specificity. In some embodiments, the anti-TCRβV antibody molecule, e.g., anti-TCRβ V6 (e.g., anti-TCRβ V6-5*01) antibody molecule, can also be a humanized, chimeric, camelid, shark, or an in vitro-generated antibody molecule. In some embodiments, the anti-TCRβV antibody molecule, e.g., anti-TCRβ V6 (e.g., anti-TCRβ V6-5*01) antibody molecule, is a humanized antibody molecule. The heavy and light chains of the anti-TCRβV antibody molecule, e.g., anti-TCRβ V6 (e.g., anti-TCRβ V6-5*01) antibody molecule, can be full-length (e.g., an antibody can include at least one, and preferably two, complete heavy chains, and at least one, and preferably two, complete light chains) or can include an antigen-binding fragment (e.g., a Fab, F(ab′)2, Fv, a single chain Fv fragment, a single domain antibody, a diabody (dAb), a bivalent antibody, or bispecific antibody or fragment thereof, a single domain variant thereof, or a camelid antibody).

[0641] In some embodiments, the anti-TCRβV antibody molecule, e.g., anti-TCRβ V6 (e.g., anti-TCRβ V6-5*01) antibody molecule, is in the form of a multispecific molecule, e.g., a bispecific molecule, e.g., as described herein.

[0642] In some embodiments, the anti-TCRβV antibody molecule, e.g., anti-TCRβ V6 (e.g., anti-TCRβ V6-5*01) antibody molecule, has a heavy chain constant region (Fc) chosen from, e.g., the heavy chain constant regions of IgG1, IgG2, IgG3, IgG4, IgM, IgA1, IgA2, IgD, and IgE. In some embodiments, the Fc region is chosen from the heavy chain constant regions of IgG1, IgG2, IgG3, and IgG4. In some embodiments, the Fc region is chosen from the heavy chain constant region of IgG1 or IgG2 (e.g., human IgG1, or IgG2). In some embodiments, the heavy chain constant region is human IgG1. In some embodiments, the Fc region comprises a Fc region variant, e.g., as described herein.

[0643] In some embodiments, the anti-TCRβV antibody molecule, e.g., anti-TCRβ V6 (e.g., anti-TCRβ V6-5*01) antibody molecule, has a light chain constant region chosen from, e.g., the light chain constant regions of kappa or lambda, preferably kappa (e.g., human kappa). In one embodiment, the constant region is altered, e.g., mutated, to modify the properties of the anti-TCRβ V antibody molecule, e.g., anti-TCRβ V6 (e.g., anti-TCRβ V6-5*01) antibody molecule (e.g., to increase or decrease one or more of: Fc receptor binding, antibody glycosylation, the number of cysteine residues, effector cell function, or complement function). For example, the constant region is mutated at positions 296 (M to Y), 298 (S to T), 300 (T to E), 477 (H to K) and 478 (N to F) to alter Fc receptor binding (e.g., the mutated positions correspond to positions 132 (M to Y), 134 (S to T), 136 (T to E), 313 (H to K) and 314 (N to F) of SEQ ID NOs: 212 or 214; or positions 135 (M to Y), 137 (S to T), 139 (T to E), 316 (H to K) and 317 (N to F) of SEQ ID NOs: 215, 216, 217, or 218), e.g., relative to human IgG1.

[0644] Antibody A-H.1 comprises a heavy chain comprising the amino acid sequence of SEQ ID NO: 3278 and a light chain comprising the amino acid sequence of SEQ ID NO: 72. Antibody A-H.2 comprises a heavy chain comprising the amino acid sequence of SEQ ID NO: 3278 and a light chain comprising the amino acid sequence of SEQ ID NO: 3279. Antibody A-H.68 comprises the amino acid sequence of SEQ ID NO: 1337, or a sequence having at least 85%, 90%, 95%, 96%, 97%, 98%, or 99% identity thereto.

[0645] Additional exemplary humanized anti-TCRβ V6 antibodies are provided in Table 1A. In some embodiments, the anti-TCRβ V6 is antibody A, e.g., humanized antibody A (antibody A-H), as provided in Table 1A. In some embodiments, the anti-TCRβV antibody comprises one or more (e.g., all three) of a LC CDR1, LC CDR2, and LC CDR3 provided in Table 1A; and/or one or more (e.g., all three) of a HC CDR1, HC CDR2, and HC CDR3 provided in Table 1A, or a sequence with at least 85%, 90%, 95%, 96%, 97%, 98%, or 99% identity thereto. In some embodiments, antibody A comprises a variable heavy chain (VH) and/or a variable light chain (VL) provided in Table 1A, or a sequence with at least 85%, 90%, 95%, 96%, 97%, 98%, or 99% identity thereto.

TABLE 1A
Amino acid and nucleotide sequences for murine,
chimeric and humanized antibody molecules which
bind to TCRVB 6, e.g., TCRVB 6-5. The antibody
molecules include murine mAb Antibody A, and
humanized mAb Antibody A-H Clones A-H.1 to A-H.68.
The amino acid the heavy and light chain CDRs,
and the amino acid and nucleotide sequences
of the heavy and light chain variable regions,
and the heavy and light chains are shown.
Antibody A (murine)

| | | |
|---|---|---|
| SEQ ID NO: 3 | HC CDR1 (Combined) | GYSFTTYYIH |
| SEQ ID NO: 4 | HC CDR2 (Combined) | WFFPGSGNIKYNEKFKG |
| SEQ ID NO: 5 | HC CDR3 (Combined) | SYYSYDVLDY |
| SEQ ID NO: 45 | HC CDR1 (Kabat) | TYYIH |
| SEQ ID NO: 46 | HC CDR2 (Kabat) | WFFPGSGNIKYNEKFKG |
| SEQ ID NO: 47 | HC CDR3 (Kabat) | SYYSYDVLDY |
| SEQ ID NO: 48 | HC CDR1 (Chothia) | GYSFTTY |
| SEQ ID NO: 49 | HC CDR2 (Chothia) | FPGSGN |
| SEQ ID NO: 50 | HC CDR3 (Chothia) | SYYSYDVLDY |
| SEQ ID NO: 1 | VH | QVQLQQSGPELVKPGTSVKISCKASGYSFTTYYIH |
| | | WVKQRPGQGLEWIGWFFPGSGNIKYNEKFKGKAT |
| | | LTADTSSSTAYMQLSSLTSEESAVYFCAGSYYSYD |
| | | VLDYWGHGTTLTVSS |
| SEQ ID NO: 6 | LC CDR1 (Combined) | KASQNVGINVV |
| SEQ ID NO: 7 | LC CDR2 (Combined) | SSSHRYS |
| SEQ ID NO: 8 | LC CDR3 (Combined) | QQFKSYPLT |
| SEQ ID NO: 51 | LC CDR1 (Kabat) | KASQNVGINVV |
| SEQ ID NO: 52 | LC CDR2 (Kabat) | SSSHRYS |
| SEQ ID NO: 53 | LC CDR3 (Kabat) | QQFKSYPLT |
| SEQ ID NO: 54 | LC CDR1 (Chothia) | KASQNVGINVV |
| SEQ ID NO: 55 | LC CDR2 (chothia) | SSSHRYS |
| SEQ ID NO: 56 | LC CDR3 (chothia) | QQFKSYPLT |
| SEQ ID NO: 2 | VL | DILMTQSQKFMSTSLGDRVSVSCKASQNVGINVV |
| | | WHQQKPGQSPKALIYSSSHRYSGVPDRFTGSGSGT |
| | | DFTLTINNVQSEDLAEYFCQQFKSYPLTFGAGTKL |
| | | ELK |

Antibody A humanized (A-H antibody)

| | | |
|---|---|---|
| A-H.1 antibody | | |
| SEQ ID NO: 3 | HC CDR1 (Combined) | GYSFTTYYIH |
| SEQ ID NO: 4 | HC CDR2 (Combined) | WFFPGSGNIKYNEKFKG |
| SEQ ID NO: 5 | HC CDR3 (Combined) | SYYSYDVLDY |
| SEQ ID NO: 9 | VH | QVQLVQSGAEVKKPGSSVKVSCKASGYSFTTYYIH |
| | | WVRQAPGQGLEWMGWFFPGSGNIKYNEKFKGRV |
| | | TITADTSTSTAYMELSSLRSEDTAVYYCAGSYYSY |
| | | DVLDYWGQGTTVTVSS |
| SEQ ID NO: 12 | DNA VH | CAGGTGCAGCTGGTTCAGTCTGGCGCCGAAGTG |
| | | AAGAAACCTGGCTCCTCCGTGAAGGTGTCCTGC |
| | | AAGGCTTCCGGCTACTCCTTCACCACCTACTACA |
| | | TCCACTGGGTCCGACAGGCCCCTGGACAAGGAT |
| | | TGGAATGGATGGGCTGGTTCTTCCCCGGCTCCGG |
| | | CAACATCAAGTACAACGAGAAGTTCAAGGGCCG |
| | | CGTGACCATCACCGCCGACACCTCTACCTCTACC |
| | | GCCTACATGGAACTGTCCAGCCTGAGATCTGAG |
| | | GACACCGCCGTGTACTACTGCGCCGGCTCCTACT |
| | | ACTCTTACGACGTGCTGGATTACTGGGGCCAGG |
| | | GCACCACAGTGACAGTGTCCTCT |
| SEQ ID NO: 69 | VH-IgM constant delta | METDTLLLWVLLLWVPGSTGQVQLVQSGAEVKK |
| | CDC | PGSSVKVSCKASGYSFTTYYIHWVRQAPGQGLEW |
| | | MGWFFPGSGNIKYNEKFKGRVTITADTSTSTAYME |
| | | LSSLRSEDTAVYYCAGSYYSYDVLDYWGQGTTVT |
| | | VSSGSASAPTLFPLVSCENSPSDTSSVAVGCLAQDF |
| | | LPDSITFSWKYKNNSDISSTRGFPSVLRGGKYAATS |
| | | QVLLPSKDVMQGTDEHVVCKVQHPNGNKEKNVP |
| | | LPVIAELPPKVSVFVPPRDGFFGNPRKSKLICQATG |
| | | FSPRQIQVSWLREGKQVGSGVTTDQVQAEAKESG |
| | | PTTYKVTSTLTIKESDWLGQSMFTCRVDHRGLTFQ |
| | | QNASSMCVPDQDTAIRVFAIPPSFASIFLTKSTKLTC |
| | | LVTDLTTYDSVTISWTRQNGEAVKTHTNISESHPN |
| | | ATFSAVGEASICEDDWNSGERFTCTVTHTDLASSL |
| | | KQTISRPKGVALHRPDVYLLPPAREQLNLRESATIT |
| | | CLVTGFSPADVFVQWMQRGQPLSPEKYVTSAPMP |
| | | EPQAPGRYFAHSILTVSEEEWNTGETYTCVVAHEA |
| | | LPNRVTERTVDKSTGKPTLYNVSLVMSDTAGTCY |
| SEQ ID NO: 70 | VH-IgGA1 | METDTLLLWVLLLWVPGSTGQVQLVQSGAEVKK |
| | | PGSSVKVSCKASGYSFTTYYIHWVRQAPGQGLEW |
| | | MGWFFPGSGNIKYNEKFKGRVTITADTSTSTAYME |
| | | LSSLRSEDTAVYYCAGSYYSYDVLDYWGQGTTVT |
| | | VSSASPTSPKVFPLSLCSTQPDGNVVIACLVQGFFP |
| | | QEPLSVTWSESGQGVTARNFPPSQDASGDLYTTSS |
| | | QLTLPATQCLAGKSVTCHVKHYTNPSQDVTVPCP |
| | | VPSTPPTPSPSTPPTPSPSCCHPRLSLHRPALEDLLL |
| | | GSEANLTCTLTGLRDASGVTFTWTPSSGKSAVQGP |
| | | PERDLCGCYSVSSVLPGCAEPWNHGKTFTCTAAYP |
| | | ESKTPLTATLSKSGNTFRPEVHLLPPPSEELALNEL |
| | | VTLTCLARGFSPKDVLVRWLQGSQELPREKYLTW |
| | | ASRQEPSQGTTTFAVTSILRVAAEDWKKGDTFSCM |
| | | VGHEALPLAFTQKTIDRLAGKPTHVNVSVVMAEV |
| | | DGTCY |
| SEQ ID NO: 71 | VH-IgGA2 | METDTLLLWVLLLWVPGSTGQVQLVQSGAEVKK |
| | | PGSSVKVSCKASGYSFTTYYIHWVRQAPGQGLEW |
| | | MGWFFPGSGNIKYNEKFKGRVTITADTSTSTAYME |
| | | LSSLRSEDTAVYYCAGSYYSYDVLDYWGQGTTVT |
| | | VSSASPTSPKVFPLSLDSTPQDGNVVVACLVQGFFP |
| | | QEPLSVTWSESGQNVTARNFPPSQDASGDLYTTSS |
| | | QLTLPATQCPDGKSVTCHVKHYTNSSQDVTVPCR |
| | | VPPPPPCCHPRLSLHRPALEDLLLGSEANLTCTLTG |
| | | LRDASGATFTWTPSSGKSAVQGPPERDLCGCYSVS |
| | | SVLPGCAQPWNHGETFTCTAAHPELKTPLTANITK |
| | | SGNTFRPEVHLLPPPSEELALNELVTLTCLARGFSP |
| | | KDVLVRWLQGSQELPREKYLTWASRQEPSQGTTT |
| | | YAVTSILRVAAEDWKKGETFSCMVGHEALPLAFT |
| | | QKTIDRMAGKPTHINVSVVMAEADGTCY |
| SEQ ID NO: | Heavy chain | METDTLLLWVLLLWVPGSTGQVQLVQSGAEVKK |
| 3278 | | PGSSVKVSCKASGYSFTTYYIHWVRQAPGQGLEW |
| | | MGWFFPGSGNIKYNEKFKGRVTITADTSTSTAYME |
| | | LSSLRSEDTAVYYCAGSYYSYDVLDYWGQGTTVT |
| | | VSSASTKGPSVFPLAPSSKSTSGGTAALGCLVKDYF |
| | | PEPVTVSWNSGALTSGVHTFPAVLQSSGLYSLSSV |
| | | VTVPSSSLGTQTYICNVNHKPSNTKVDKRVEPKSC |
| | | DKTHTCPPCPAPELLGGPSVFLFPPKPKDTLMISRT |
| | | PEVTCVVVDVSHEDPEVKFNWYVDGVEVHNAKT |
| | | KPREEQYNSTYRVVSVLTVLHQDWLNGKEYKCK |
| | | VSNKALPAPIEKTISKAKGQPREPQVYTLPPSREEM |
| | | TKNQVSLTCLVKGFYPSDIAVEWESNGQPENNYK |
| | | TTPPVLDSDGSFFLYSKLTVDKSRWQQGNVFSCSV |
| | | MHEALHNHYTQKSLSLSPGK |
| SEQ ID NO: 6 | LC CDR1 (Combined) | KASQNVGINVV |
| SEQ ID NO: 7 | LC CDR2 (Combined) | SSSHRYS |
| SEQ ID NO: 8 | LC CDR3 (Combined) | QQFKSYPLT |
| SEQ ID NO: 10 | VL | DIQMTQSPSFLSASVGDRVTITCKASQNVGINVVW |
| | | HQQKPGKAPKALIYSSSHRYSGVPSRFSGSGSGTEF |
| | | TLTISSLQPEDFATYFCQQFKSYPLTFGQGTKLEIK |
| SEQ ID NO: 13 | DNA VL | GACATCCAGATGACCCAGTCTCCATCCTTCCTGT |
| | | CCGCCTCTGTGGGCGACAGAGTGACCATCACAT |
| | | GCAAGGCCTCTCAGAACGTGGGCATCAACGTCG |
| | | TGTGGCACCAGCAGAAGCCTGGCAAGGCTCCTA |
| | | AGGCTCTGATCTACTCCTCCAGCCACCGGTACTC |
| | | TGGCGTGCCCTCTAGATTTTCCGGCTCTGGCTCT |
| | | GGCACCGAGTTTACCCTGACAATCTCCAGCCTGC |
| | | AGCCTGAGGACTTCGCCACCTACTTTTGCCAGCA |
| | | GTTCAAGAGCTACCCTCTGACCTTTGGCCAGGGC |
| | | ACCAAGCTGGAAATCAAG |
| SEQ ID NO: 72 | VL and kappa constant | METDTLLLWVLLLWVPGSTGDIQMTQSPSFLSASV |
| | region/light chain | GDRVTITCKASQNVGINVVWHQQKPGKAPKALIY |
| | | SSSHRYSGVPSRFSGSGSGTEFTLTISSLQPEDFATY |
| | | FCQQFKSYPLTFGQGTKLEIKRTVAAPSVFIFPPSDE |
| | | QLKSGTASVVCLLNNFYPREAKVQWKVDNALQS |
| | | GNSQESVTEQDSKDSTYSLSSTLTLSKADYEKHKV |
| | | YACEVTHQGLSSPVTKSFNRGEC |
| A-H.2 antibody | | |
| SEQ ID NO: 3 | HC CDR1 (Combined) | GYSFTTYYIH |
| SEQ ID NO: 4 | HC CDR2 (Combined) | WFFPGSGNIKYNEKFKG |
| SEQ ID NO: 5 | HC CDR3 (Combined) | SYYSYDVLDY |
| SEQ ID NO: 9 | VH | QVQLVQSGAEVKKPGSSVKVSCKASGYSFTTYYIH |
| | | WVRQAPGQGLEWMGWFFPGSGNIKYNEKFKGRV |
| | | TITADTSTSTAYMELSSLRSEDTAVYYCAGSYYSY |
| | | DVLDYWGQGTTVTVSS |
| SEQ ID NO: 12 | DNA VH | CAGGTGCAGCTGGTTCAGTCTGGCGCCGAAGTG |
| | | AAGAAACCTGGCTCCTCCGTGAAGGTGTCCTGC |
| | | AAGGCTTCCGGCTACTCCTTCACCACCTACTACA |
| | | TCCACTGGGTCCGACAGGCCCCTGGACAAGGAT |
| | | TGGAATGGATGGGCTGGTTCTTCCCCGGCTCCGG |
| | | CAACATCAAGTACAACGAGAAGTTCAAGGGCCG |
| | | CGTGACCATCACCGCCGACACCTCTACCTCTACC |
| | | GCCTACATGGAACTGTCCAGCCTGAGATCTGAG |
| | | GACACCGCCGTGTACTACTGCGCCGGCTCCTACT |
| | | ACTCTTACGACGTGCTGGATTACTGGGGCCAGG |
| | | GCACCACAGTGACAGTGTCCTCT |
| SEQ ID NO: | Heavy chain | METDTLLLWVLLLWVPGSTGQVQLVQSGAEVKK |
| 3278 | | PGSSVKVSCKASGYSFTTYYIHWVRQAPGQGLEW |
| | | MGWFFPGSGNIKYNEKFKGRVTITADTSTSTAYME |
| | | LSSLRSEDTAVYYCAGSYYSYDVLDYWGQGTTVT |
| | | VSSASTKGPSVFPLAPSSKSTSGGTAALGCLVKDYF |
| | | PEPVTVSWNSGALTSGVHTFPAVLQSSGLYSLSSV |
| | | VTVPSSSLGTQTYICNVNHKPSNTKVDKRVEPKSC |
| | | DKTHTCPPCPAPELLGGPSVFLFPPKPKDTLMISRT |
| | | PEVTCVVVDVSHEDPEVKFNWYVDGVEVHNAKT |
| | | KPREEQYNSTYRVVSVLTVLHQDWLNGKEYKCK |
| | | VSNKALPAPIEKTISKAKGQPREPQVYTLPPSREEM |
| | | TKNQVSLTCLVKGFYPSDIAVEWESNGQPENNYK |
| | | TTPPVLDSDGSFFLYSKLTVDKSRWQQGNVFSCSV |
| | | MHEALHNHYTQKSLSLSPGK |
| SEQ ID NO: 6 | LC CDR1 (Combined) | KASQNVGINVV |
| SEQ ID NO: 7 | LC CDR2 (Combined) | SSSHRYS |
| SEQ ID NO: 8 | LC CDR3 (Combined) | QQFKSYPLT |
| SEQ ID NO: 11 | VL | DIQMTQSPSSLSASVGDRVTITCKASQNVGINVVW |
| | | HQQKPGKVPKALIYSSSHRYSGVPSRFSGSGSGTDF |
| | | TLTISSLQPEDVATYFCQQFKSYPLTFGQGTKLEIK |
| SEQ ID NO: 14 | DNA VL | GACATCCAGATGACCCAGTCTCCATCCTCTCTGT |
| | | CCGCCTCTGTGGGCGACAGAGTGACCATCACAT |
| | | GCAAGGCCTCTCAGAACGTGGGCATCAACGTCG |
| | | TGTGGCACCAGCAGAAACCTGGCAAGGTGCCCA |
| | | AGGCTCTGATCTACTCCTCCAGCCACAGATACTC |
| | | CGGCGTGCCCTCTAGATTCTCCGGCTCTGGCTCT |
| | | GGCACCGACTTTACCCTGACAATCTCCAGCCTGC |
| | | AGCCTGAGGACGTGGCCACCTACTTTTGCCAGC |
| | | AGTTCAAGAGCTACCCTCTGACCTTTGGCCAGGG |
| | | CACCAAGCTGGAAATCAAG |
| SEQ ID NO: | Light chain | METDTLLLWVLLLWVPGSTGDIQMTQSPSSLSASV |
| 3279 | | GDRVTITCKASQNVGINVVWHQQKPGKVPKALIY |
| | | SSSHRYSGVPSRFSGSGSGTDFTLTISSLQPEDVATY |
| | | FCQQFKSYPLTFGQGTKLEIKRTVAAPSVFIFPPSDE |
| | | QLKSGTASVVCLLNNFYPREAKVQWKVDNALQS |
| | | GNQESVTEQDSKDSTYSLSSTLTLSKADYEKHKV |
| | | YACEVTHQGLSSPVTKSFNRGEC |
| A-H.3 antibody | | |
| SEQ ID NO: 80 | VH + VL | QVQLVQSGAEVKKPGSSVKVSCKASGTDFKLTYIH |
| | | WVRQAPGQGLEWMGRVSPGSGNTKYNEKFKGRV |
| | | TITADTSTSTAYMELSSLRSEDTAVYYCAGSYYSY |
| | | DVLDYWGQGTTVTVSSGGGGSGGGGSGGGGSGG |
| | | GGSDIQMTQSPSFLSASVGDRVTITCKASQNVEDR |
| | | VAWYQQKPGKAPKALIYSSSHRYKGVPSRFSGSGS |
| | | GTEFTLTISSLQPEDFATYFCQQFKSYPLTFGQGTK |
| | | LEIK |
| SEQ ID NO: 81 | VL | DIQMTQSPSFLSASVGDRVTITCKASQNVEDRVAW |
| | | YQQKPGKAPKALIYSSSHRYKGVPSRFSGSGSGTE |
| | | FTLTISSLQPEDFATYFCQQFKSYPLTFGQGTKLEIK |
| SEQ ID NO: 82 | VH | QVQLVQSGAEVKKPGSSVKVSCKASGTDFKLTYIH |
| | | WVRQAPGQGLEWMGRVSPGSGNTKYNEKFKGRV |
| | | TITADTSTSTAYMELSSLRSEDTAVYYCAGSYYSY |
| | | DVLDYWGQGTTVTVSS |
| A-H.4 | | |
| SEQ ID NO: 83 | VH + VL | QVQLVQSGAEVKKPGSSVKVSCKASGTDFDKIYIH |
| | | WVRQAPGQGLEWMGRISAGSGNVKYNEKFKGRV |
| | | TITADTSTSTAYMELSSLRSEDTAVYYCAGSYYSY |
| | | DVLDYWGQGTTVTVSSGGGGSGGGGSGGGGSGG |
| | | GGSDIQMTQSPSFLSASVGDRVTITCKASQNVEDR |
| | | VAWYQQKPGKAPKALIYSSSHRYKGVPSRFSGSGS |
| | | GTEFTLTISSLQPEDFATYFCQQFKSYPLTFGQGTK |
| | | LEIK |
| SEQ ID NO: 84 | VL | DIQMTQSPSFLSASVGDRVTITCKASQNVEDRVAW |
| | | YQQKPGKAPKALIYSSSHRYKGVPSRFSGSGSGTE |
| | | FTLTISSLQPEDFATYFCQQFKSYPLTFGQGTKLEIK |
| SEQ ID NO: 85 | VH | QVQLVQSGAEVKKPGSSVKVSCKASGTDFDKIYIH |
| | | WVRQAPGQGLEWMGRISAGSGNVKYNEKFKGRV |
| | | TITADTSTSTAYMELSSLRSEDTAVYYCAGSYYSY |
| | | DVLDYWGQGTTVTVSS |
| A-H.5 | | |
| SEQ ID NO: 86 | VH + VL | QVQLVQSGAEVKKPGSSVKVSCKASGHDFRDFYI |
| | | HWVRQAPGQGLEWMGRVYPGSGSYRYNEKFKGR |
| | | VTITADTSTSTAYMELSSLRSEDTAVYYCAGSYYS |
| | | YDVLDYWGQGTTVTVSSGGGGSGGGGSGGGGSG |
| | | GGGSDIQMTQSPSFLSASVGDRVTITCKASQNVDD |
| | | RVAWYQQKPGKAPKALIYSSSHRYKGVPSRFSGS |
| | | GSGTEFTLTISSLQPEDFATYFCQQFKSYPLTFGQG |
| | | TKLEIK |
| SEQ ID NO: 87 | VL | DIQMTQSPSFLSASVGDRVTITCKASQNVDDRVAW |
| | | YQQKPGKAPKALIYSSSHRYKGVPSRFSGSGSGTE |
| | | FTLTISSLQPEDFATYFCQQFKSYPLTFGQGTKLEIK |
| SEQ ID NO: 88 | VH | QVQLVQSGAEVKKPGSSVKVSCKASGHDFRDFYI |
| | | HWVRQAPGQGLEWMGRVYPGSGSYRYNEKFKGR |
| | | VTITADTSTSTAYMELSSLRSEDTAVYYCAGSYYS |
| | | YDVLDYWGQGTTVTVSS |
| A-H.6 | | |
| SEQ ID NO: 89 | VH + VL | QVQLVQSGAEVKKPGSSVKVSCKASGHDFKLTYI |
| | | HWVRQAPGQGLEWMGRISAGSGNVKYNEKFKGR |
| | | VTITADTSTSTAYMELSSLRSEDTAVYYCAGSYYS |
| | | YDVLDYWGQGTTVTVSSGGGGSGGGGSGGGGSG |
| | | GGGSDIQMTQSPSFLSASVGDRVTITCKASQNVDN |
| | | RVAWYQQKPGKAPKALIYSSSHRYKGVPSRFSGS |
| | | GSGTEFTLTISSLQPEDFATYFCQQFKSYPLTFGQG |
| | | TKLEIK |
| SEQ ID NO: 90 | VL | DIQMTQSPSFLSASVGDRVTITCKASQNVDNRVAW |
| | | YQQKPGKAPKALIYSSSHRYKGVPSRFSGSGSGTE |
| | | FTLTISSLQPEDFATYFCQQFKSYPLTFGQGTKLEIK |
| SEQ ID NO: 91 | VH | QVQLVQSGAEVKKPGSSVKVSCKASGHDFKLTYI |
| | | HWVRQAPGQGLEWMGRISAGSGNVKYNEKFKGR |
| | | VTITADTSTSTAYMELSSLRSEDTAVYYCAGSYYS |
| | | YDVLDYWGQGTTVTVSS |
| A-H.7 | | |
| SEQ ID NO: 92 | VH + VL | QVQLVQSGAEVKKPGSSVKVSCKASGTDFKLTYIH |
| | | WVRQAPGQGLEWMGRIFPGSGNVKYNEKFKGRV |
| | | TITADTSTSTAYMELSSLRSEDTAVYYCAGSYYSY |
| | | DVLDYWGQGTTVTVSSGGGGSGGGGSGGGGSGG |
| | | GGSDIQMTQSPSFLSASVGDRVTITCKASQNVENK |
| | | VAWHQQKPGKAPKALIYSSSHRYKGVPSRFSGSGS |
| | | GTEFTLTISSLQPEDFATYFCQQFKSYPLTFGQGTK |
| | | LEIK |
| SEQ ID NO: 93 | VL | DIQMTQSPSFLSASVGDRVTITCKASQNVENKVAW |
| | | HQQKPGKAPKALIYSSSHRYKGVPSRFSGSGSGTE |
| | | FTLTISSLQPEDFATYFCQQFKSYPLTFGQGTKLEIK |
| SEQ ID NO: 94 | VH | QVQLVQSGAEVKKPGSSVKVSCKASGTDFKLTYIH |
| | | WVRQAPGQGLEWMGRIFPGSGNVKYNEKFKGRV |
| | | TITADTSTSTAYMELSSLRSEDTAVYYCAGSYYSY |
| | | DVLDYWGQGTTVTVSS |
| A-H.8 | | |
| SEQ ID NO: 95 | VH + VL | QVQLVQSGAEVKKPGSSVKVSCKASGTDFDKIYIH |
| | | WVRQAPGQGLEWMGRIFAGSGNTKYNEKFKGRV |
| | | TITADTSTSTAYMELSSLRSEDTAVYYCAGSYYSY |
| | | DVLDYWGQGTTVTVSSGGGGSGGGGSGGGGSGG |
| | | GGSDIQMTQSPSFLSASVGDRVTITCKASQNVDDR |
| | | VAWYQQKPGKAPKALIYSSSHRYKGVPSRFSGSGS |
| | | GTEFTLTISSLQPEDFATYFCQQFKSYPLTFGQGTK |
| | | LEIK |
| SEQ ID NO: 96 | VL | DIQMTQSPSFLSASVGDRVTITCKASQNVDDRVAW |
| | | YQQKPGKAPKALIYSSSHRYKGVPSRFSGSGSGTE |
| | | FTLTISSLQPEDFATYFCQQFKSYPLTFGQGTKLEIK |
| SEQ ID NO: 97 | VH | QVQLVQSGAEVKKPGSSVKVSCKASGTDFDKIYIH |
| | | WVRQAPGQGLEWMGRIFAGSGNTKYNEKFKGRV |
| | | TITADTSTSTAYMELSSLRSEDTAVYYCAGSYYSY |
| | | DVLDYWGQGTTVTVSS |
| A-H.9 | | |
| SEQ ID NO: 98 | VH + VL | QVQLVQSGAEVKKPGSSVKVSCKASGHDFDKFYI |
| | | HWVRQAPGQGLEWMGRVSAGSGNVKYNEKFKG |
| | | RVTITADTSTSTAYMELSSLRSEDTAVYYCAGSYY |
| | | SYDVLDYWGQGTTVTVSSGGGGSGGGGSGGGGS |
| | | GGGGSDIQMTQSPSFLSASVGDRVTITCKASNVG |
| | | NRVAWYQQKPGKAPKALIYSSSHRYSGVPSRFSGS |
| | | GSGTEFTLTISSLQPEDFATYFCQQFKSYPLTFGQG |
| | | TKLEIK |
| SEQ ID NO: 99 | VL | DIQMTQSPSFLSASVGDRVTITCKASQNVGNRVAW |
| | | YQQKPGKAPKALIYSSSHRYSGVPSRFSGSGSGTEF |
| | | TLTISSLQPEDFATYFCQQFKSYPLTFGQGTKLEIK |
| SEQ ID NO: | VH | QVQLVQSGAEVKKPGSSVKVSCKASGHDFDKFYI |
| 100 | | HWVRQAPGQGLEWMGRVSAGSGNVKYNEKFKG |
| | | RVTITADTSTSTAYMELSSLRSEDTAVYYCAGSYY |
| | | SYDVLDYWGQGTTVTVSS |
| A-H.10 | | |
| SEQ ID NO: | VH + VL | QVQLVQSGAEVKKPGSSVKVSCKASGHDFDKFYI |
| 101 | | HWVRQAPGQGLEWMGRIFAGSGNVKYNEKFKGR |
| | | VTITADTSTSTAYMELSSLRSEDTAVYYCAGSYYS |
| | | YDVLDYWGQGTTVTVSSGGGGSGGGGSGGGGSG |
| | | GGGSDIQMTQSPSFLSASVGDRVTITCKASQNVGD |
| | | RVAWYQQKPGKAPKALIYSSSHRYKGVPSRFSGS |
| | | GSGTEFTLTISSLQPEDFATYFCQQFKSYPLTFGQG |
| | | TKLEIKs |
| SEQ ID NO: | VL | DIQMTQSPSFLSASVGDRVTITCKASQNVGDRVAW |
| 102 | | YQQKPGKAPKALIYSSSHRYKGVPSRFSGSGSGTE |
| | | FTLTISSLQPEDFATYFCQQFKSYPLTFGQGTKLEIK |
| SEQ ID NO: | VH | QVQLVQSGAEVKKPGSSVKVSCKASGHDFDKFYI |
| 103 | | HWVRQAPGQGLEWMGRIFAGSGNVKYNEKFKGR |
| | | VTITADTSTSTAYMELSSLRSEDTAVYYCAGSYYS |
| | | YDVLDYWGQGTTVTVSS |
| A-H.11 | | |
| SEQ ID NO: | VH + VL | QVQLVQSGAEVKKPGSSVKVSCKASGTDFKLTYIH |
| 104 | | WVRQAPGQGLEWMGRVSPGSGNVKYNEKFKGRV |
| | | TITADTSTSTAYMELSSLRSEDTAVYYCAGSYYSY |
| | | DVLDYWGQGTTVTVSSGGGGSGGGGSGGGGSGG |
| | | GGSDIQMTQSPSFLSASVGDRVTITCKASQNVGDR |
| | | VAWYQQKPGKAPKALIYSSSHRYKGVPSRFSGSGS |
| | | GTEFTLTISSLQPEDFATYFCQQFKSYPLTFGQGTK |
| | | LEIK |
| SEQ ID NO: | VL | DIQMTQSPSFLSASVGDRVTITCKASQNVGDRVAW |
| 105 | | YQQKPGKAPKALIYSSSHRYKGVPSRFSGSGSGTE |
| | | FTLTISSLQPEDFATYFCQQFKSYPLTFGQGTKLEIK |
| SEQ ID NO: | VH | QVQLVQSGAEVKKPGSSVKVSCKASGTDFKLTYIH |
| 106 | | WVRQAPGQGLEWMGRVSPGSGNVKYNEKFKGRV |
| | | TITADTSTSTAYMELSSLRSEDTAVYYCAGSYYSY |
| | | DVLDYWGQGTTVTVSS |
| A-H.12 | | |
| SEQ ID NO: | VH + VL | QVQLVQSGAEVKKPGSSVKVSCKASGTDFDKIYIH |
| 107 | | WVRQAPGQGLEWMGRVSAGSGNTKYNEKFKGR |
| | | VTITADTSTSTAYMELSSLRSEDTAVYYCAGSYYS |
| | | YDVLDYWGQGTTVTVSSGGGGSGGGGSGGGGSG |
| | | GGGSDIQMTQSPSFLSASVGDRVTITCKASQNVGN |
| | | RVAWYQQKPGKAPKALIYSSSHRYKGVPSRFSGS |
| | | GSGTEFTLTISSLQPEDFATYFCQQFKSYPLTFGQG |
| | | TKLEIK |
| SEQ ID NO: | VL | DIQMTQSPSFLSASVGDRVTITCKASQNVGNRVAW |
| 108 | | YQQKPGKAPKALIYSSSHRYKGVPSRFSGSGSGTE |
| | | FTLTISSLQPEDFATYFCQQFKSYPLTFGQGTKLEIK |
| SEQ ID NO: | VH | QVQLVQSGAEVKKPGSSVKVSCKASGTDFDKIYIH |
| 109 | | WVRQAPGQGLEWMGRVSAGSGNTKYNEKFKGR |
| | | VTITADTSTSTAYMELSSLRSEDTAVYYCAGSYYS |
| | | YDVLDYWGQGTTVTVSS |
| A-H.13 | | |
| SEQ ID NO: | VH + VL | QVQLVQSGAEVKKPGSSVKVSCKASGTDFKLTYIH |
| 110 | | WVRQAPGQGLEWMGRIFPGSGNVKYNEKFKGRV |
| | | TITADTSTSTAYMELSSLRSEDTAVYYCAGSYYSY |
| | | DVLDYWGQGTTVTVSSGGGGSGGGGSGGGGSGG |
| | | GGSDIQMTQSPSFLSASVGDRVTITCKASQNVDNR |
| | | VAWYQQKPGKAPKALIYSSSHRYKGVPSRFSGSGS |
| | | GTEFTLTISSLQPEDFATYFCQQFKSYPLTFGQGTK |
| | | LEIK |
| SEQ ID NO: | VL | DIQMTQSPSFLSASVGDRVTITCKASQNVDNRVAW |
| 111 | | YQQKPGKAPKALIYSSSHRYKGVPSRFSGSGSGTE |
| | | FTLTISSLQPEDFATYFCQQFKSYPLTFGQGTKLEIK |
| SEQ ID NO: | VH | QVQLVQSGAEVKKPGSSVKVSCKASGTDFKLTYIH |
| 112 | | WVRQAPGQGLEWMGRIFPGSGNVKYNEKFKGRV |
| | | TITADTSTSTAYMELSLRSEDTAVYYCAGSYYSY |
| | | DVLDYWGQGTTVTVSS |
| A-H.14 | | |
| SEQ ID NO: | VH + VL | QVQLVQSGAEVKKPGSSVKVSCKASGTDFDKIYIH |
| 113 | | WVRQAPGQGLEWMGRISAGSGNTKYNEKFKGRV |
| | | TITADTSTSTAYMELSSLRSEDTAVYYCAGSYYSY |
| | | DVLDYWGQGTTVTVSSGGGGSGGGGSGGGGSGG |
| | | GGSDIQMTQSPSFLSASVGDRVTITCKASQNVDDR |
| | | VAWYQQKPGKAPKALIYSSSHRYKGVPSRFSGSGS |
| | | GTEFTLTISSLQPEDFATYFCQQFKSYPLTFGQGTK |
| | | LEIK |
| SEQ ID NO: | VL | DIQMTQSPSFLSASVGDRVTITCKASQNVDDRVAW |
| 114 | | YQQKPGKAPKALIYSSSHRYKGVPSRFSGSGSGTE |
| | | FTLTISSLQPEDFATYFCQQFKSYPLTFGQGTKLEIK |
| SEQ ID NO: | VH | QVQLVQSGAEVKKPGSSVKVSCKASGTDFDKIYIH |
| 115 | | WVRQAPGQGLEWMGRISAGSGNTKYNEKFKGRV |
| | | TITADTSTSTAYMELSSLRSEDTAVYYCAGSYYSY |
| | | DVLDYWGQGTTVTVSS |
| A-H.15 | | |
| SEQ ID NO: | VH + VL | QVQLVQSGAEVKKPGSSVKVSCKASGTDFRLTYIH |
| 116 | | WVRQAPGQGLEWMGRVSPGSGNTKYNEKFKGRV |
| | | TITADTSTSTAYMELSSLRSEDTAVYYCAGSYYSY |
| | | DVLDYWGQGTTVTVSSGGGGSGGGGSGGGGSGG |
| | | GGSDIQMTQSPSFLSASVGDRVTITCKASQNVDNK |
| | | VAWHQQKPGKAPKALIYSSSHRYKGVPSRFSGSGS |
| | | GTEFTLTISSLQPEDFATYFCQQFKSYPLTFGQGTK |
| | | LEIK |
| SEQ ID NO: | VL | DIQMTQSPSFLSASVGDRVTITCKASQNVDNKVA |
| 117 | | WHQQKPGKAPKALIYSSSHRYKGVPSRFSGSGSGT |
| | | EFTLTISSLQPEDFATYFCQQFKSYPLTFGQGTKLEI |
| | | K |
| SEQ ID NO: | VH | QVQLVQSGAEVKKPGSSVKVSCKASGTDFRLTYIH |
| 118 | | WVRQAPGQGLEWMGRVSPGSGNTKYNEKFKGRV |
| | | TITADTSTSTAYMELSSLRSEDTAVYYCAGSYYSY |
| | | DVLDYWGQGTTVTVSS |
| A-H.16 | | |
| SEQ ID NO: | VH + VL | QVQLVQSGAEVKKPGSSVKVSCKASGGTFRLTYIH |
| 119 | | WVRQAPGQGLEWMGRVYPGSGNTKYNEKFKGR |
| | | VTITADTSTSTAYMELSSLRSEDTAVYYCAGSYYS |
| | | YDVLDYWGQGTTVTVSSGGGGSGGGGSGGGGSG |
| | | GGGSDIQMTQSPSFLSASVGDRVTITCKASQNVDD |
| | | RVAWYQQKPGKAPKALIYSSSHRYKGVPSRFSGS |
| | | GSGTEFTLTISSLQPEDFATYFCQQFKSYPLTFGQG |
| | | TKLEIK |
| SEQ ID NO: | VL | DIQMTQSPSFLSASVGDRVTITCKASQNVDDRVAW |
| 120 | | YQQKPGKAPKALIYSSSHRYKGVPSRFSGSGSGTE |
| | | FTLTISSLQPEDFATYFCQQFKSYPLTFGQGTKLEIK |
| SEQ ID NO: | VH | QVQLVQSGAEVKKPGSSVKVSCKASGGTFRLTYIH |
| 121 | | WVRQAPGQGLEWMGRVYPGSGNTKYNEKFKGR |
| | | VTITADTSTSTAYMELSSLRSEDTAVYYCAGSYYS |
| | | YDVLDYWGQGTTVTVSS |
| A-H.17 | | |
| SEQ ID NO: | VH + VL | QVQLVQSGAEVKKPGSSVKVSCKASGTDFRLTYIH |
| 122 | | WVRQAPGQGLEWMGRIFPGSGNTKYNEKFKGRV |
| | | TITADTSTSTAYMELSSLRSEDTAVYYCAGSYYSY |
| | | DVLDYWGQGTTVTVSSGGGGSGGGGSGGGGSGG |
| | | GGSDIQMTQSPSFLSASVGDRVTITCKASQNVDDR |
| | | VAWYQQKPGKAPKALIYSSSHRYKGVPSRFSGSGS |
| | | GTEFTLTISSLQPEDFATYFCQQFKSYPLTFGQGTK |
| | | LEIK |
| SEQ ID NO: | VL | DIQMTQSPSFLSASVGDRVTITCKASQNVDDRVAW |
| 123 | | YQQKPGKAPKALIYSSSHRYKGVPSRFSGSGSGTE |
| | | FTLTISSLQPEDFATYFCQQFKSYPLTFGQGTKLEIK |
| SEQ ID NO: | VH | QVQLVQSGAEVKKPGSSVKVSCKASGTDFRLTYIH |
| 124 | | WVRQAPGQGLEWMGRIFPGSGNTKYNEKFKGRV |
| | | TITADTSTSTAYMELSSLRSEDTAVYYCAGSYYSY |
| | | DVLDYWGQGTTVTVSS |
| A-H.18 | | |
| SEQ ID NO: | VH + VL | QVQLVQSGAEVKKPGSSVKVSCKASGTDFKLTYIH |
| 125 | | WVRQAPGQGLEWMGRIFPGSGNVKYNEKFKGRV |
| | | TITADTSTSTAYMELSSLRSEDTAVYYCAGSYYSY |
| | | DVLDYWGQGTTVTVSSGGGGSGGGGSGGGGSGG |
| | | GGSDIQMTQSPSFLSASVGDRVTITCKASQNVEDR |
| | | VAWYQQKPGKAPKALIYSSSHRYKGVPSRFSGSGS |
| | | GTEFTLTISSLQPEDFATYFCQQFKSYPLTFGQGTK |
| | | LEIK |
| SEQ ID NO: | VL | DIQMTQSPSFLSASVGDRVTITCKASQNVEDRVAW |
| 126 | | YQQKPGKAPKALIYSSSHRYKGVPSRFSGSGSGTE |
| | | FTLTISSLQPEDFATYFCQQFKSYPLTFGQGTKLEIK |
| SEQ ID NO: | VH | QVQLVQSGAEVKKPGSSVKVSCKASGTDFKLTYIH |
| 127 | | WVRQAPGQGLEWMGRIFPGSGNVKYNEKFKGRV |
| | | TITADTSTSTAYMELSSLRSEDTAVYYCAGSYYSY |
| | | DVLDYWGQGTTVTVSS |
| A-H.19 | | |
| SEQ ID NO: | VH + VL | QVQLVQSGAEVKKPGSSVKVSCKASGGTFRLTYIH |
| 128 | | WVRQAPGQGLEWMGRISAGSGNVKYNEKFKGRV |
| | | TITADTSTSTAYMELSSLRSEDTAVYYCAGSYYSY |
| | | DVLDYWGQGTTVTVSSGGGGSGGGGSGGGGSGG |
| | | GGSDIQMTQSPSFLSASVGDRVTITCKASQNVGDR |
| | | VAWYQQKPGKAPKALIYSSSHRYKGVPSRFSGSGS |
| | | GTEFTLTISSLQPEDFATYFCQQFKSYPLTFGQGTK |
| | | LEIK |
| SEQ ID NO: | VL | DIQMTQSPSFLSASVGDRVTITCKASQNVGDRVAW |
| 129 | | YQQKPGKAPKALIYSSSHRYKGVPSRFSGSGSGTE |
| | | FTLTISSLQPEDFATYFCQQFKSYPLTFGQGTKLEIK |
| SEQ ID NO: | VH | QVQLVQSGAEVKKPGSSVKVSCKASGGTFRLTYIH |
| 130 | | WVRQAPGQGLEWMGRISAGSGNVKYNEKFKGRV |
| | | TITADTSTSTAYMELSSLRSEDTAVYYCAGSYYSY |
| | | DVLDYWGQGTTVTVSS |
| A-H.20 | | |
| SEQ ID NO: | VH + VL | QVQLVQSGAEVKKPGSSVKVSCKASGGTFDKTYI |
| 131 | | HWVRQAPGQGLEWMGRISAGSGNTKYNEKFKGR |
| | | VTITADTSTSTAYMELSSLRSEDTAVYYCAGSYYS |
| | | YDVLDYWGQGTTVTVSSGGGGSGGGGSGGGGSG |
| | | GGGSDIQMTQSPSFLSASVGDRVTITCKASQNVDD |
| | | RVAWYQQKPGKAPKALIYSSSHRYKGVPSRFSGS |
| | | GSGTEFTLTISSLQPEDFATYFCQQFKSYPLTFGQG |
| | | TKLEIK |
| SEQ ID NO: | VL | DIQMTQSPSFLSASVGDRVTITCKASQNVDDRVAW |
| 132 | | YQQKPGKAPKALIYSSSHRYKGVPSRFSGSGSGTE |
| | | FTLTISSLQPEDFATYFCQQFKSYPLTFGQGTKLEIK |
| SEQ ID NO: | VH | QVQLVQSGAEVKKPGSSVKVSCKASGGTFDKTYI |
| 133 | | HWVRQAPGQGLEWMGRISAGSGNTKYNEKFKGR |
| | | VTITADTSTSTAYMELSSLRSEDTAVYYCAGSYYS |
| | | YDVLDYWGQGTTVTVSS |
| A-H.21 | | |
| SEQ ID NO: | VH + VL | QVQLVQSGAEVKKPGSSVKVSCKASGHDFDKFYI |
| 134 | | HWVRQAPGQGLEWMGRISAGSGNTKYNEKFKGR |
| | | VTITADTSTSTAYMELSSLRSEDTAVYYCAGSYYS |
| | | YDVLDYWGQGTTVTVSSGGGGSGGGGSGGGGSG |
| | | GGGSDIQMTQSPSFLSASVGDRVTITCKASQNVDD |
| | | RVAWYQQKPGKAPKALIYSSSHRYKGVPSRFSGS |
| | | GSGTEFTLTISSLQPEDFATYFCQQFKSYPLTFGQG |
| | | TKLEIK |
| SEQ ID NO: | VL | DIQMTQSPSFLSASVGDRVTITCKASQNVDDRVAW |
| 135 | | YQQKPGKAPKALIYSSSHRYKGVPSRFSGSGSGTE |
| | | FTLTISSLQPEDFATYFCQQFKSYPLTFGQGTKLEIK |
| SEQ ID NO: | VH | QVQLVQSGAEVKKPGSSVKVSCKASGHDFDKFYI |
| 136 | | HWVRQAPGQGLEWMGRISAGSGNTKYNEKFKGR |
| | | VTITADTSTSTAYMELSSLRSEDTAVYYCAGSYYS |
| | | YDVLDYWGQGTTVTVSS |
| A-H.22 | | |
| SEQ ID NO: | VH + VL | QVQLVQSGAEVKKPGSSVKVSCKASGTDFKLTYIH |
| 137 | | WVRQAPGQGLEWMGRISAGSGNVKYNEKFKGRV |
| | | TITADTSTSTAYMELSSLRSEDTAVYYCAGSYYSY |
| | | DVLDYWGQGTTVTVSSGGGGSGGGGSGGGGSGG |
| | | GGSDIQMTQSPSFLSASVGDRVTITCKASQNVDNK |
| | | VAWHQQKPGKAPKALIYSSSHRYKGVPSRFSGSGS |
| | | GTEFTLTISSLQPEDFATYFCQQFKSYPLTFGQGTK |
| | | LEIK |
| SEQ ID NO: | VL | DIQMTQSPSFLSASVGDRVTITCKASQNVDNKVA |
| 138 | | WHQQKPGKAPKALIYSSSHRYKGVPSRFSGSGSGT |
| | | EFTLTISSLQPEDFATYFCQQFKSYPLTFGQGTKLEI |
| | | K |
| SEQ ID NO: | VH | QVQLVQSGAEVKKPGSSVKVSCKASGTDFKLTYIH |
| 139 | | WVRQAPGQGLEWMGRISAGSGNVKYNEKFKGRV |
| | | TITADTSTSTAYMELSSLRSEDTAVYYCAGSYYSY |
| | | DVLDYWGQGTTVTVSS |
| A-H.23 | | |
| SEQ ID NO: | VH + VL | QVQLVQSGAEVKKPGSSVKVSCKASGHDFRLTYI |
| 140 | | HWVRQAPGQGLEWMGRISAGSGNVKYNEKFKGR |
| | | VTITADTSTSTAYMELSSLRSEDTAVYYCAGSYYS |
| | | YDVLDYWGQGTTVTVSSGGGGSGGGGSGGGGSG |
| | | GGGSDIQMTQSPSFLSASVGDRVTITCKASQNVAD |
| | | RVAWYQQKPGKAPKALIYSSSHRYKGVPSRFSGS |
| | | GSGTEFTLTISSLQPEDFATYFCQQFKSYPLTFGQG |
| | | TKLEIK |
| SEQ ID NO: | VL | DIQMTQSPSFLSASVGDRVTITCKASQNVADRVAW |
| 141 | | YQQKPGKAPKALIYSSHRYKGVPSRFSGSGSGTE |
| | | FTLTISSLQPEDFATYFCQQFKSYPLTFGQGTKLEIK |
| SEQ ID NO: | VH | QVQLVQSGAEVKKPGSSVKVSCKASGHDFRLTYI |
| 142 | | HWVRQAPGQGLEWMGRISAGSGNVKYNEKFKGR |
| | | VTITADTSTSTAYMELSSLRSEDTAVYYCAGSYYS |
| | | YDVLDYWGQGTTVTVSS |
| A-H.24 | | |
| SEQ ID NO: | VH + VL | QVQLVQSGAEVKKPGSSVKVSCKASGHDFHLWYI |
| 143 | | HWVRQAPGQGLEWMGRVSAGSGNVKYNEKFKG |
| | | RVTITADTSTSTAYMELSSLRSEDTAVYYCAGSYY |
| | | SYDVLDYWGQGTTVTVSSGGGGSGGGGSGGGGS |
| | | GGGGSDIQMTQSPSFLSASVGDRVTITCKASQNVD |
| | | NKVAWHQQKPGKAPKALIYSSSHRYKGVPSRFSG |
| | | SGSGTEFTLTISSLQPEDFATYFCQQFKSYPLTFGQ |
| | | GTKLEIK |
| SEQ ID NO: | VL | DIQMTQSPSFLSASVGDRVTITCKASQNVDNKVA |
| 144 | | WHQQKPGKAPKALIYSSSHRYKGVPSRFSGSGSGT |
| | | EFTLTISSLQPEDFATYFCQQFKSYPLTFGQGTKLEI |
| | | K |
| SEQ ID NO: | VH | QVQLVQSGAEVKKPGSSVKVSCKASGHDFHLWYI |
| 145 | | HWVRQAPGQGLEWMGRVSAGSGNVKYNEKFKG |
| | | RVTITADTSTSTAYMELSSLRSEDTAVYYCAGSYY |
| | | SYDVLDYWGQGTTVTVSS |
| A-H.25 | | |
| SEQ ID NO: | VH + VL | QVQLVQSGAEVKKPGSSVKVSCKASGHDFHLWYI |
| 146 | | HWVRQAPGQGLEWMGRVFAGSGNTKYNEKFKG |
| | | RVTITADTSTSTAYMELSSLRSEDTAVYYCAGSYY |
| | | SYDVLDYWGQGTTVTVSSGGGGSGGGGSGGGGS |
| | | GGGGSDIQMTQSPSFLSASVGDRVTITCKASQNVE |
| | | DKVAWYQQKPGKAPKALIYSSSHRYKGVPSRFSG |
| | | SGSGTEFTLTISSLQPEDFATYFCQQFKSYPLTFGQ |
| | | GTKLEIK |
| SEQ ID NO: | VL | DIQMTQSPSFLSASVGDRVTITCKASQNVEDKVAW |
| 147 | | YQQKPGKAPKALIYSSSHRYKGVPSRFSGSGSGTE |
| | | FTLTISSLQPEDFATYFCQQFKSYPLTFGQGTKLEIK |
| SEQ ID NO: | VH | QVQLVQSGAEVKKPGSSVKVSCKASGHDFHLWYI |
| 148 | | HWVRQAPGQGLEWMGRVFAGSGNTKYNEKFKG |
| | | RVTITADTSTSTAYMELSSLRSEDTAVYYCAGSYY |
| | | SYDVLDYWGQGTTVTVSS |
| A-H.26 | | |
| SEQ ID NO: | VH + VL | QVQLVQSGAEVKKPGSSVKVSCKASGTDFKLTYIH |
| 149 | | WVRQAPGQGLEWMGRIFPGSGNTKYNEKFKGRV |
| | | TITADTSTSTAYMELSSLRSEDTAVYYCAGSYYSY |
| | | DVLDYWGQGTTVTVSSGGGGSGGGGSGGGGSGG |
| | | GGSDIQMTQSPSFLSASVGDRVTITCKASQNVDDR |
| | | VAWYQQKPGKAPKALIYSSSHRYKGVPSRFSGSGS |
| | | GTEFTLTISSLQPEDFATYFCQQFKSYPLTFGQGTK |
| | | LEIK |
| SEQ ID NO: | VL | DIQMTQSPSFLSASVGDRVTITCKASQNVDDRVAW |
| 150 | | YQQKPGKAPKALIYSSSHRYKGVPSRFSGSGSGTE |
| | | FTLTISSLQPEDFATYFCQQFKSYPLTFGQGTKLEIK |
| SEQ ID NO: | VH | QVQLVQSGAEVKKPGSSVKVSCKASGTDFKLTYIH |
| 151 | | WVRQAPGQGLEWMGRIFPGSGNTKYNEKFKGRV |
| | | TITADTSTSTAYMELSSLRSEDTAVYYCAGSYYSY |
| | | DVLDYWGQGTTVTVSS |
| A-H.27 | | |
| SEQ ID NO: | VH + VL | QVQLVQSGAEVKKPGSSVKVSCKASGTDFKLTYIH |
| 153 | | WVRQAPGQGLEWMGRVSAGSGNVKYNEKFKGR |
| | | VTITADTSTSTAYMELSSLRSEDTAVYYCAGSYYS |
| | | YDVLDYWGQGTTVTVSSGGGGSGGGGSGGGGSG |
| | | GGGSDIQMTQSPSFLSASVGDRVTITCKASQNVGN |
| | | RVAWYQQKPGKAPKALIYSSSHRYKGVPSRFSGS |
| | | GSGTEFTLTISSLQPEDFATYFCQQFKSYPLTFGQG |
| | | TKLEIK |
| SEQ ID NO: | VL | DIQMTQSPSFLSASVGDRVTITCKASQNVGNRVAW |
| 154 | | YQQKPGKAPKALIYSSSHRYKGVPSRFSGSGSGTE |
| | | FTLTISSLQPEDFATYFCQQFKSYPLTFGQGTKLEIK |
| SEQ ID NO: | VH | QVQLVQSGAEVKKPGSSVKVSCKASGTDFKLTYIH |
| 155 | | WVRQAPGQGLEWMGRVSAGSGNVKYNEKFKGR |
| | | VTITADTSTSTAYMELSSLRSEDTAVYYCAGSYYS |
| | | YDVLDYWGQGTTVTVSS |
| A-H.28 | | |
| SEQ ID NO: | VH + VL | QVQLVQSGAEVKKPGSSVKVSCKASGTDFKLTYIH |
| 156 | | WVRQAPGQGLEWMGRISPGSGNTKYNEKFKGRV |
| | | TITADTSTSTAYMELSSLRSEDTAVYYCAGSYYSY |
| | | DVLDYWGQGTTVTVSSGGGGSGGGGSGGGGSGG |
| | | GGSDIQMTQSPSFLSASVGDRVTITCKASQNVGDR |
| | | VAWYQQKPGKAPKALIYSSSHRYKGVPSRFSGSGS |
| | | GTEFTLTISSLQPEDFATYFCQQFKSYPLTFGQGTK |
| | | LEIK |
| SEQ ID NO: | VL | DIQMTQSPSFLSASVGDRVTITCKASQNVGDRVAW |
| 157 | | YQQKPGKAPKALIYSSSHRYKGVPSRFSGSGSGTE |
| | | FTLTISSLQPEDFATYFCQQFKSYPLTFGQGTKLEIK |
| SEQ ID NO: | VH | QVQLVQSGAEVKKPGSSVKVSCKASGTDFKLTYIH |
| 158 | | WVRQAPGQGLEWMGRISPGSGNTKYNEKFKGRV |
| | | TITADTSTSTAYMELSSLRSEDTAVYYCAGSYYSY |
| | | DVLDYWGQGTTVTVSS |
| A-H.29 | | |
| SEQ ID NO: | VH + VL | QVQLVQSGAEVKKPGSSVKVSCKASGHDFHLWYI |
| 159 | | HWVRQAPGQGLEWMGRISPGSGNVKYNEKFKGR |
| | | VTITADTSTSTAYMELSSLRSEDTAVYYCAGSYYS |
| | | YDVLDYWGQGTTVTVSSGGGGSGGGGSGGGGSG |
| | | GGGSDIQMTQSPSFLSASVGDRVTITCKASQNVGD |
| | | RVAWHQQKPGKAPKALIYSSSHRYKGVPSRFSGS |
| | | GSGTEFTLTISSLQPEDFATYFCQQFKSYPLTFGQG |
| | | TKLEIK |
| SEQ ID NO: | VL | DIQMTQSPSFLSASVGDRVTITCKASQNVGDRVAW |
| 160 | | HQQKPGKAPKALIYSSSHRYKGVPSRFSGSGSGTE |
| | | FTLTISSLQPEDFATYFCQQFKSYPLTFGQGTKLEIK |
| SEQ ID NO: | VH | QVQLVQSGAEVKKPGSSVKVSCKASGHDFHLWYI |
| 161 | | HWVRQAPGQGLEWMGRISPGSGNVKYNEKFKGR |
| | | VTITADTSTSTAYMELSSLRSEDTAVYYCAGSYYS |
| | | YDVLDYWGQGTTVTVSS |
| A-H.31 | | |
| SEQ ID NO: | VH + VL | QVQLVQSGAEVKKPGSSVKVSCKASGHDFKLTYI |
| 162 | | HWVRQAPGQGLEWMGRISAGSGNVKYNEKFKGR |
| | | VTITADTSTSTAYMELSSLRSEDTAVYYCAGSYYS |
| | | YDVLDYWGQGTTVTVSSGGGGSGGGGSGGGGSG |
| | | GGGSDIQMTQSPSFLSASVGDRVTITCKASQNVDD |
| | | RVAWYQQKPGKAPKALIYSSSHRYKGVPSRFSGS |
| | | GSGTEFTLTISSLQPEDFATYFCQQFKSYPLTFGQG |
| | | TKLEIK |
| SEQ ID NO: | VL | DIQMTQSPSFLSASVGDRVTITCKASQNVDDRVAW |
| 163 | | YQQKPGKAPKALIYSSSHRYKGVPSRFSGSGSGTE |
| | | FTLTISSLQPEDFATYFCQQFKSYPLTFGQGTKLEIK |
| SEQ ID NO: | VH | QVQLVQSGAEVKKPGSSVKVSCKASGHDFKLTYI |
| 164 | | HWVRQAPGQGLEWMGRISAGSGNVKYNEKFKGR |
| | | VTITADTSTSTAYMELSSLRSEDTAVYYCAGSYYS |
| | | YDVLDYWGQGTTVTVSS |
| A-H.31 | | |
| SEQ ID NO: | VH + VL | QVQLVQSGAEVKKPGSSVKVSCKASGTDFHLWYI |
| 165 | | HWVRQAPGQGLEWMGRVFAGSGSYRYNEKFKGR |
| | | VTITADTSTSTAYMELSSLRSEDTAVYYCAGSYYS |
| | | YDVLDYWGQGTTVTVSSGGGGSGGGGSGGGGSG |
| | | GGGSDIQMTQSPSFLSASVGDRVTITCKASQNVDD |
| | | RVAWYQQKPGKAPKALIYSSSHRYKGVPSRFSGS |
| | | GSGTEFTLTISSLQPEDFATYFCQQFKSYPLTFGQG |
| | | TKLEIK |
| SEQ ID NO: | VL | DIQMTQSPSFLSASVGDRVTITCKASQNVDDRVAW |
| 166 | | YQQKPGKAPKALIYSSSHRYKGVPSRFSGSGSGTE |
| | | FTLTISSLQPEDFATYFCQQFKSYPLTFGQGTKLEIK |
| SEQ ID NO: | VH | QVQLVQSGAEVKKPGSSVKVSCKASGTDFHLWYI |
| 167 | | HWVRQAPGQGLEWMGRVFAGSGSYRYNEKFKGR |
| | | VTITADTSTSTAYMELSSLRSEDTAVYYCAGSYYS |
| | | YDVLDYWGQGTTVTVSS |
| A-H.32 | | |
| SEQ ID NO: | VH + VL | QVQLVQSGAEVKKPGSSVKVSCKASGTDFDKIYIH |
| 168 | | WVRQAPGQGLEWMGRISAGSGNTKYNEKFKGRV |
| | | TITADTSTSTAYMELSSLRSEDTAVYYCAGSYYSY |
| | | DVLDYWGQGTTVTVSSGGGGSGGGGSGGGGSGG |
| | | GGSDIQMTQSPSFLSASVGDRVTITCKASQNVADR |
| | | VAWYQQKPGKAPKALIYSSSHRYKGVPSRFSGSGS |
| | | GTEFTLTISSLQPEDFATYFCQQFKSYPLTFGQGTK |
| | | LEIK |
| SEQ ID NO: | VL | DIQMTQSPSFLSASVGDRVTITCKASQNVADRVAW |
| 169 | | YQQKPGKAPKALIYSSSHRYKGVPSRFSGSGSGTE |
| | | FTLTISSLQPEDFATYFCQQFKSYPLTFGQGTKLEIK |
| SEQ ID NO: | VH | QVQLVQSGAEVKKPGSSVKVSCKASGTDFDKIYIH |
| 170 | | WVRQAPGQGLEWMGRISAGSGNTKYNEKFKGRV |
| | | TITADTSTSTAYMELSSLRSEDTAVYYCAGSYYSY |
| | | DVLDYWGQGTTVTVSS |
| A-H.33 | | |
| SEQ ID NO: | VH + VL | QVQLVQSGAEVKKPGSSVKVSCKASGTDFKLTYIH |
| 171 | | WVRQAPGQGLEWMGRISAGSGNTKYNEKFKGRV |
| | | TITADTSTSTAYMELSSLRSEDTAVYYCAGSYYSY |
| | | DVLDYWGQGTTVTVSSGGGGSGGGGSGGGGSGG |
| | | GGSDIQMTQSPSFLSASVGDRVTITCKASQNVEDR |
| | | VAWYQQKPGKAPKALIYSSSHRYKGVPSRFSGSGS |
| | | GTEFTLTISSLQPEDFATYFCQQFKSYPLTFGQGTK |
| | | LEIK |
| SEQ ID NO: | VL | DIQMTQSPSFLSASVGDRVTITCKASQNVEDRVAW |
| 172 | | YQQKPGKAPKALIYSSSHRYKGVPSRFSGSGSGTE |
| | | FTLTISSLQPEDFATYFCQQFKSYPLTFGQGTKLEIK |
| SEQ ID NO: | VH | QVQLVQSGAEVKKPGSSVKVSCKASGTDFKLTYIH |
| 173 | | WVRQAPGQGLEWMGRISAGSGNTKYNEKFKGRV |
| | | TITADTSTSTAYMELSSLRSEDTAVYYCAGSYYSY |
| | | DVLDYWGQGTTVTVSS |
| A-H.34 | | |
| SEQ ID NO: | VH + VL | QVQLVQSGAEVKKPGSSVKVSCKASGTDFRLTYIH |
| 174 | | WVRQAPGQGLEWMGRISPGSGNTKYNEKFKGRV |
| | | TITADTSTSTAYMELSSLRSEDTAVYYCAGSYYSY |
| | | DVLDYWGQGTTVTVSSGGGGSGGGGSGGGGSGG |
| | | GGSDIQMTQSPSFLSASVGDRVTITCKASQNVGNR |
| | | VAWYQQKPGKAPKALIYSSSHRYKGVPSRFSGSGS |
| | | GTEFTLTISSLQPEDFATYFCQQFKSYPLTFGQGTK |
| | | LEIK |
| SEQ ID NO: | VL | DIQMTQSPSFLSASVGDRVTITCKASQNVGNRVAW |
| 175 | | YQQKPGKAPKALIYSSSHRYKGVPSRFSGSGSGTE |
| | | FTLTISSLQPEDFATYFCQQFKSYPLTFGQGTKLEIK |
| SEQ ID NO: | VH | QVQLVQSGAEVKKPGSSVKVSCKASGTDFRLTYIH |
| 176 | | WVRQAPGQGLEWMGRISPGSGNTKYNEKFKGRV |
| | | TITADTSTSTAYMELSSLRSEDTAVYYCAGSYYSY |
| | | DVLDYWGQGTTVTVSS |
| A-H.35 | | |
| SEQ ID NO: | VH + VL | QVQLVQSGAEVKKPGSSVKVSCKASGHDFDKTYI |
| 177 | | HWVRQAPGQGLEWMGRVSAGSGNVKYNEKFKG |
| | | RVTITADTSTSTAYMELSSLRSEDTAVYYCAGSYY |
| | | SYDVLDYWGQGTTVTVSSGGGGSGGGGSGGGGS |
| | | GGGGSDIQMTQSPSFLSASVGDRVTITCKASQNVE |
| | | DRVAWYQQKPGKAPKALIYSSSHRYKGVPSRFSG |
| | | SGSGTEFTLTISSLQPEDFATYFCQQFKSYPLTFGQ |
| | | GTKLEIK |
| SEQ ID NO: | VL | DIQMTQSPSFLSASVGDRVTITCKASQNVEDRVAW |
| 178 | | YQQKPGKAPKALIYSSSHRYKGVPSRFSGSGSGTE |
| | | FTLTISSLQPEDFATYFCQQFKSYPLTFGQGTKLEIK |
| SEQ ID NO: | VH | QVQLVQSGAEVKKPGSSVKVSCKASGHDFDKTYI |
| 179 | | HWVRQAPGQGLEWMGRVSAGSGNVKYNEKFKG |
| | | RVTITADTSTSTAYMELSSLRSEDTAVYYCAGSYY |
| | | SYDVLDYWGQGTTVTVSS |
| A-H.36 | | |
| SEQ ID NO: | VH + VL | QVQLVQSGAEVKKPGSSVKVSCKASGHDFKLTYI |
| 180 | | HWVRQAPGQGLEWMGRVSPGSGNTKYNEKFKGR |
| | | VTITADTSTSTAYMELSSLRSEDTAVYYCAGSYYS |
| | | YDVLDYWGQGTTVTVSSGGGGSGGGGSGGGGSG |
| | | GGGSDIQMTQSPSFLSASVGDRVTITCKASQNVED |
| | | RVAWHQQKPGKAPKALIYSSSHRYKGVPSRFSGS |
| | | GSGTEFTLTISSLQPEDFATYFCQQFKSYPLTFGQG |
| | | TKLEIK |
| SEQ ID NO: | VL | DIQMTQSPSFLSASVGDRVTITCKASQNVEDRVAW |
| 181 | | HQQKPGKAPKALIYSSSHRYKGVPSRFSGSGSGTE |
| | | FTLTISSLQPEDFATYFCQQFKSYPLTFGQGTKLEIK |
| SEQ ID NO: | VH | QVQLVQSGAEVKKPGSSVKVSCKASGHDFKLTYI |
| 182 | | HWVRQAPGQGLEWMGRVSPGSGNTKYNEKFKGR |
| | | VTITADTSTSTAYMELSSLRSEDTAVYYCAGSYYS |
| | | YDVLDYWGQGTTVTVSS |
| A-H.37 | | |
| SEQ ID NO: | VH + VL | QVQLVQSGAEVKKPGSSVKVSCKASGHDFDKTYI |
| 183 | | HWVRQAPGQGLEWMGRIYPGSGNVKYNEKFKGR |
| | | VTITADTSTSTAYMELSSLRSEDTAVYYCAGSYYS |
| | | YDVLDYWGQGTTVTVSSGGGGSGGGGSGGGGSG |
| | | GGGSDIQMTQSPSFLSASVGDRVTITCKASQNVAD |
| | | RVAWYQQKPGKAPKALIYSSSHRYKGVPSRFSGS |
| | | GSGTEFTLTISSLQPEDFATYFCQQFKSYPLTFGQG |
| | | TKLEIK |
| SEQ ID NO: | VL | DIQMTQSPSFLSASVGDRVTITCKASQNVADRVAW |
| 184 | | YQQKPGKAPKALIYSSSHRYKGVPSRFSGSGSGTE |
| | | FTLTISSLQPEDFATYFCQQFKSYPLTFGQGTKLEIK |
| SEQ ID NO: | VH | QVQLVQSGAEVKKPGSSVKVSCKASGHDFDKTYI |
| 185 | | HWVRQAPGQGLEWMGRIYPGSGNVKYNEKFKGR |
| | | VTITADTSTSTAYMELSSLRSEDTAVYYCAGSYYS |
| | | YDVLDYWGQGTTVTVSS |
| A-H.38 | | |
| SEQ ID NO: | VH + VL | QVQLVQSGAEVKKPGSSVKVSCKASGTDFDKTYI |
| 186 | | HWVRQAPGQGLEWMGRISAGSGNVKYNEKFKGR |
| | | VTITADTSTSTAYMELSSLRSEDTAVYYCAGSYYS |
| | | YDVLDYWGQGTTVTVSSGGGGSGGGGSGGGGSG |
| | | GGGSDIQMTQSPSFLSASVGDRVTITCKASQNVDD |
| | | RVAWYQQKPGKAPKALIYSSSHRYKGVPSRFSGS |
| | | GSGTEFTLTISSLQPEDFATYFCQQFKSYPLTFGQG |
| | | TKLEIK |
| SEQ ID NO: | VL | DIQMTQSPSFLSASVGDRVTITCKASQNVDDRVAW |
| 187 | | YQQKPGKAPKALIYSSSHRYKGVPSRFSGSGSGTE |
| | | FTLTISSLQPEDFATYFCQQFKSYPLTFGQGTKLEIK |
| SEQ ID NO: | VH | QVQLVQSGAEVKKPGSSVKVSCKASGTDFDKTYI |
| 188 | | HWVRQAPGQGLEWMGRISAGSGNVKYNEKFKGR |
| | | VTITADTSTSTAYMELSSLRSEDTAVYYCAGSYYS |
| | | YDVLDYWGQGTTVTVSS |
| A-H.39 | | |
| SEQ ID NO: | VH + VL | QVQLVQSGAEVKKPGSSVKVSCKASGTDFDKIYIH |
| 189 | | WVRQAPGQGLEWMGRISAGSGNIKYNEKFKGRVT |
| | | ITADTSTSTAYMELSSLRSEDTAVYYCAGSYYSYD |
| | | VLDYWGQGTTVTVSSGGGGSGGGGSGGGGSGGG |
| | | GSDIQMTQSPSFLSASVGDRVTITCKASQNVDDRV |
| | | AWYQQKPGKAPKALIYSSSHRYKGVPSRFSGSGSG |
| | | TEFTLTISSLQPEDFATYFCQQFKSYPLTFGQGTKL |
| | | EIK |
| SEQ ID NO: | VL | DIQMTQSPSFLSASVGDRVTITCKASQNVDDRVAW |
| 190 | | YQQKPGKAPKALIYSSSHRYKGVPSRFSGSGSGTE |
| | | FTLTISSLQPEDFATYFCQQFKSYPLTFGQGTKLEIK |
| SEQ ID NO: | VH | QVQLVQSGAEVKKPGSSVKVSCKASGTDFDKIYIH |
| 191 | | WVRQAPGQGLEWMGRISAGSGNIKYNEKFKGRVT |
| | | ITADTSTSTAYMELSSLRSEDTAVYYCAGSYYSYD |
| | | VLDYWGQGTTVTVSS |
| A-H.40 | | |
| SEQ ID NO: | VH + VL | QVQLVQSGAEVKKPGSSVKVSCKASGTDFDKIYIH |
| 192 | | WVRQAPGQGLEWMGRISAGSGNVKYNEKFKGRV |
| | | TITADTSTSTAYMELSSLRSEDTAVYYCAGSYYSY |
| | | DVLDYWGQGTTVTVSSGGGGSGGGGSGGGGSGG |
| | | GGSDIQMTQSPSFLSASVGDRVTITCKASQNVGDR |
| | | VAWYQQKPGKAPKALIYSSSHRYKGVPSRFSGSGS |
| | | GTEFTLTISSLQPEDFATYFCQQFKSYPLTFGQGTK |
| | | LEIK |
| SEQ ID NO: | VL | DIQMTQSPSFLSASVGDRVTITCKASQNVGDRVAW |
| 193 | | YQQKPGKAPKALIYSSSHRYKGVPSRFSGSGSGTE |
| | | FTLTISSLQPEDFATYFCQQFKSYPLTFGQGTKLEIK |
| SEQ ID NO: | VH | QVQLVQSGAEVKKPGSSVKVSCKASGTDFDKIYIH |
| 194 | | WVRQAPGQGLEWMGRISAGSGNVKYNEKFKGRV |
| | | TITADTSTSTAYMELSSLRSEDTAVYYCAGSYYSY |
| | | DVLDYWGQGTTVTVSS |
| A-H.41 | | |
| SEQ ID NO: | VH + VL | QVQLVQSGAEVKKPGSSVKVSCKASGGTFKLTYIH |
| 195 | | WVRQAPGQGLEWMGRVSAGSGNVKYNEKFKGR |
| | | VTITADTSTSTAYMELSSLRSEDTAVYYCAGSYYS |
| | | YDVLDYWGQGTTVTVSSGGGGSGGGGSGGGGSG |
| | | GGGSDIQMTQSPSFLSASVGDRVTITCKASQNVDD |
| | | RVAWYQQKPGKAPKALIYSSSHRYKGVPSRFSGS |
| | | GSGTEFTLTISSLQPEDFATYFCQQFKSYPLTFGQG |
| | | TKLEIK |
| SEQ ID NO: | VL | DIQMTQSPSFLSASVGDRVTITCKASQNVDDRVAW |
| 196 | | YQQKPGKAPKALIYSSSHRYKGVPSRFSGSGSGTE |
| | | FTLTISSLQPEDFATYFCQQFKSYPLTFGQGTKLEIK |
| SEQ ID NO: | VH | QVQLVQSGAEVKKPGSSVKVSCKASGGTFKLTYIH |
| 197 | | WVRQAPGQGLEWMGRVSAGSGNVKYNEKFKGR |
| | | VTITADTSTSTAYMELSSLRSEDTAVYYCAGSYYS |
| | | YDVLDYWGQGTTVTVSS |
| A-H.42 | | |
| SEQ ID NO: | VH + VL | QVQLVQSGAEVKKPGSSVKVSCKASGTDFKLTYIH |
| 198 | | WVRQAPGQGLEWMGRISPGSGNVKYNEKFKGRV |
| | | TITADTSTSTAYMELSSLRSEDTAVYYCAGSYYSY |
| | | DVLDYWGQGTTVTVSSGGGGSGGGGSGGGGSGG |
| | | GGSDIQMTQSPSFLSASVGDRVTITCKASQNVDNR |
| | | VAWHQQKPGKAPKALIYSSSHRYKGVPSRFSGSGS |
| | | GTEFTLTISSLQPEDFATYFCQQFKSYPLTFGQGTK |
| | | LEIK |
| SEQ ID NO: | VL | DIQMTQSPSFLSASVGDRVTITCKASQNVDNRVAW |
| 199 | | HQQKPGKAPKALIYSSSHRYKGVPSRFSGSGSGTE |
| | | FTLTISSLQPEDFATYFCQQFKSYPLTFGQGTKLEIK |
| SEQ ID NO: | VH | QVQLVQSGAEVKKPGSSVKVSCKASGTDFKLTYIH |
| 200 | | WVRQAPGQGLEWMGRISPGSGNVKYNEKFKGRV |
| | | TITADTSTSTAYMELSSLRSEDTAVYYCAGSYYSY |
| | | DVLDYWGQGTTVTVSS |
| A-H.43 | | |
| SEQ ID NO: | VH + VL | QVQLVQSGAEVKKPGSSVKVSCKASGHDFDKFYI |
| 201 | | HWVRQAPGQGLEWMGRVSAGSGNTKYNEKFKG |
| | | RVTITADTSTSTAYMELSSLRSEDTAVYYCAGSYY |
| | | SYDVLDYWGQGTTVTVSSGGGGSGGGGSGGGGS |
| | | GGGGSDIQMTQSPSFLSASVGDRVTITCKASQNVD |
| | | NRVAWYQQKPGKAPKALIYSSSHRYKGVPSRFSG |
| | | SGSGTEFTLTISSLQPEDFATYFCQQFKSYPLTFGQ |
| | | GTKLEIK |
| SEQ ID NO: | VL | DIQMTQSPSFLSASVGDRVTITCKASQNVDNRVAW |
| 202 | | YQQKPGKAPKALIYSSSHRYKGVPSRFSGSGSGTE |
| | | FTLTISSLQPEDFATYFCQQFKSYPLTFGQGTKLEIK |
| SEQ ID NO: | VH | QVQLVQSGAEVKKPGSSVKVSCKASGHDFDKFYI |
| 203 | | HWVRQAPGQGLEWMGRVSAGSGNTKYNEKFKG |
| | | RVTITADTSTSTAYMELSSLRSEDTAVYYCAGSYY |
| | | SYDVLDYWGQGTTVTVSS |
| A-H.44 | | |
| SEQ ID NO: | VH + VL | QVQLVQSGAEVKKPGSSVKVSCKASGTDFDKFYI |
| 204 | | HWVRQAPGQGLEWMGRVSAGSGNVKYNEKFKG |
| | | RVTITADTSTSTAYMELSSLRSEDTAVYYCAGSYY |
| | | SYDVLDYWGQGTTVTVSSGGGGSGGGGSGGGGS |
| | | GGGGSDIQMTQSPSFLSASVGDRVTITCKASQNVG |
| | | DRVVWYQQKPGKAPKALIYSSSHRYKGVPSRFSG |
| | | SGSGTEFTLTISSLQPEDFATYFCQQFKSYPLTFGQ |
| | | GTKLEIK |
| SEQ ID NO: | VH | QVQLVQSGAEVKKPGSSVKVSCKASGTDFDKFYI |
| 205 | | HWVRQAPGQGLEWMGRVSAGSGNVKYNEKFKG |
| | | RVTITADTSTSTAYMELSSLRSEDTAVYYCAGSYY |
| | | SYDVLDYWGQGTTVTVSS |
| A-H.45 | | |
| SEQ ID NO: | VH + VL | QVQLVQSGAEVKKPGSSVKVSCKASGYSFTTYYIH |
| 206 | | WVRQAPGQGLEWMGWFSAGSGNTKYNEKFKGR |
| | | VTITADTSTSTAYMELSSLRSEDTAVYYCAVSYYS |
| | | YDVLDYWGQGTTVTVSSGGGGSGGGGSGGGGSG |
| | | GGGSDIQMTQSPSFLSASVGDRVTITCKASQNVGIN |
| | | VVWHQQKPGKAPKALIYSSSHRYSGVPSRFSGSGS |
| | | GTEFTLTISSLQPEDFATYFCQQFKSYPLTFGQGTK |
| | | LEIK |
| SEQ ID NO: | VH | QVQLVQSGAEVKKPGSSVKVSCKASGYSFTTYYIH |
| 207 | | WVRQAPGQGLEWMGWFSAGSGNTKYNEKFKGR |
| | | VTITADTSTSTAYMELSSLRSEDTAVYYCAVSYYS |
| | | YDVLDYWGQGTTVTVSS |
| A-H.46 | | |
| SEQ ID NO: | VH + VL | QVQLVQSGAEVKKPGSSVKVSCKASGYSFTTYYIH |
| 208 | | WVRQAPGQGLEWMGWFSAGSGNTKYNEKFKGR |
| | | VTITADTSTSTAYMELSSLRSEDTAVYYCAGSYYS |
| | | YDVLDYWGQGTTVTVSSGGGGSGGGGSGGGGSG |
| | | GGGSDIQMTQSPSFLSASVGDRVTITCKASQNVGIN |
| | | VVWHQQKPGKAPKALIYSSSHRYSGVPSRFSGSGS |
| | | GTEFTLTISSLQPEDFATYFCQQFKSYPLTEGQGTK |
| | | LEIK. |
| SEQ ID NO: | VH | QVQLVQSGAEVKKPGSSVKVSCKASGYSFTTYYIH |
| 209 | | WVRQAPGQGLEWMGWFSAGSGNTKYNEKFKGR |
| | | VTITADTSTSTAYMELSSLRSEDTAVYYCAGSYYS |
| | | YDVLDYWGQGTTVTVSS |
| A-H.47 | | |
| SEQ ID NO: | VH + VL | QVQLVQSGAEVKKPGSSVKVSCKASGYSFTTTYYIH |
| 210 | | WVRQAPGQGLEWMGWFFPGSGNTKYNEKEKGRV |
| | | TITADTSTSTAYMELSSLRSEDTAVYYCAGSYYSY |
| | | DVLDYWGQTTVTVSSGGGGSGGGGSGGGGSGG |
| | | GGSDIQMTQSPSFLSASVGDRVTITCKASQNVGINV |
| | | VWHQQKPGKAPKALIYSSSHRYSGVPSRFSGSGSG |
| | | TEFTLTISSLQPEDFATYFCQQFKSYPLTFGQGTKL |
| | | EIK |
| SEQ ID NO: | VH | QVQLVQSGAEVKKPGSSVKVSCKASGYSFTTYYIH |
| 211 | | WVRQAPGQGLEWMGWFFPGSGNTKYNEKFKGRV |
| | | TITADTSTSTAYMELSSLRSEDTAVYYCAGSYYSY |
| | | DVLDYWGQGTTVTVSS |
| A-H.48 | | |
| SEQ ID NO: | VH + VL | QVQLVQSGAEVKKPGSSVKVSCKASGYSFTTYYIH |
| 212 | | WVRQAPGQGLEWMGWFSPGSGNTKYNEKFKGRV |
| | | TITADTSTSTAYMELSSLRSEDTAVYYCAVSYYSY |
| | | DVLDYWGQGTTVTVSSGGGGSGGGGSGGGGSGG |
| | | GGSDIQMTQSPSFLSASVGDRVTITCKASQNVGINV |
| | | VWHQQKPGKAPKALIYSSSHRYSGVPSRFSGSGSG |
| | | TEFTLTISSLQPEDFATYFCQQFKSYPLTFGQGTKL |
| | | EIK |
| SEQ ID NO: | VH | QVQLVQSGAEVKKPGSSVKVSCKASGYSFTTYYIH |
| 213 | | WVRQAPGQGLEWMGWFSPGSGNTKYNEKFKGRV |
| | | TITADTSTSTAYMELSSLRSEDTAVYYCAVSYYSY |
| | | DVLDYWGQGTTVTVSS |
| A-H.49 | | |
| SEQ ID NO: | VH + VL | QVQLVQSGAEVKKPGSSVKVSCKASGYSFTTYYIH |
| 214 | | WVRQAPGQGLEWMGWFSPGSGNTKYNEKFKGRV |
| | | TITADTSTSTAYMELSSLRSEDTAVYYCAGSYYSY |
| | | DVLDYWGQGTTVTVSSGGGGSGGGGSGGGGSGG |
| | | GGSDIQMTQSPSFLSASVGDRVTITCKASQNVGINV |
| | | VWHQQKPGKAPKALIYSSSHRYSGVPSRFSGSGSG |
| | | TEFTLTISSLQPEDFATYFCQQFKSYPLTFGQGTKL |
| | | EIK |
| SEQ ID NO: | VH | QVQLVQSGAEVKKPGSSVKVSCKASGYSFTTYYIH |
| 215 | | WVRQAPGQGLEWMGWFSPGSGNTKYNEKFKGRV |
| | | TITADTSTSTAYMELSSLRSEDTAVYYCAGSYYSY |
| | | DVLDYWGQGTTVTVSS |
| A-H.50 | | |
| SEQ ID NO: | VH + VL | QVQLVQSGAEVKKPGSSVKVSCKASGYSFTTYYIH |
| 216 | | WVRQAPGQGLEWMGRIFPGSGNIKYNEKFKGRVT |
| | | ITADTSTSTAYMELSSLRSEDTAVYYCAGSYYSYD |
| | | VLDYWGQGTTVTVSSGGGGSGGGGSGGGGSGGG |
| | | GSDIQMTQSPSFLSASVGDRVTITCKASQNVGINVV |
| | | WHQQKPGKAPKALIYSSSHRYSGVPSRFSGSGSGT |
| | | EFTLTISSLQPEDFATYFCQQFKSYPLTFGQGTKLEI |
| | | K |
| SEQ ID NO: | VH | QVQLVQSGAEVKKPGSSVKVSCKASGYSFTTYYIH |
| 217 | | WVRQAPGQGLEWMGRIFPGSGNIKYNEKFKGRVT |
| | | ITADTSTSTAYMELSSLRSEDTAVYYCAGSYYSYD |
| | | VLDYWGQGTTVTVSS |
| A-H.51 | | |
| SEQ ID NO: | VH + VL | QVQLVQSGAEVKKPGSSVKVSCKASGYSFTTYYIH |
| 218 | | WVRQAPGQGLEWMGWFFPGSGNIKYNEKFKGRV |
| | | TITADTSTSTAYMELSSLRSEDTAVYYCAGSIYSAG |
| | | VLDYWGQGTTVTVSSGGGGSGGGGSGGGGSGGG |
| | | GSDIQMTQSPSFLSASVGDRVTTTCKASQNVGINVV |
| | | WHQQKPGKAPKALIYSSSHRYSGVPSRFSGSGSGT |
| | | EFTLTISSLQPEDFATYFCQQFKSYPLTFGQGTKLEI |
| | | K |
| SEQ ID NO: | VH | QVQLVQSGAEVKKPGSSVKVSCKASGYSFTTYYIH |
| 219 | | WVRQAPGQGLEWMGWFFPGSGNIKYNEKFKGRV |
| | | TITADTSTSTAYMELSSLRSEDTAVYYCAGSIYSAG |
| | | VLDYWGQGTTVTVSS |
| A-H.52 | | |
| SEQ ID NO: | VH + VL | QVQLVQSGAEVKKPGSSVKVSCKASGYSFTLGYIH |
| 220 | | WVRQAPGQGLEWMGWFFPGSGNIKYNEKFKGRV |
| | | TITADTSTSTAYMELSSLRSEDTAVYYCAGSYYSY |
| | | DVLDYWGQGTTVTVSSGGGGSGGGGSGGGGSGG |
| | | GGSDIQMTQSPSFLSASVGDRVTITCKASQNVGINV |
| | | VWHQQKPGKAPKALIYSSSHRYSGVPSRFSGSGSG |
| | | TEFTLTISSLQPEDFATYFCQQFKSYPLTFGQGTKL |
| | | EIK |
| SEQ ID NO: | VH | QVQLVQSGAEVKKPGSSVKVSCKASGYSFTLGYIH |
| 221 | | WVRQAPGQGLEWMGWFFPGSGNIKYNEKFKGRV |
| | | TITADTSTSTAYMELSSLRSEDTAVYYCAGSYYSY |
| | | DVLDYWGQGTTVTVSS |
| A-H.53 | | |
| SEQ ID NO: | VH + VL | QVQLVQSGAEVKKPGSSVKVSCKASGYSFRLTYIH |
| 222 | | WVRQAPGQGLEWMGWFFPGSGNIKYNEKFKGRV |
| | | TITADTSTSTAYMELSSLRSEDTAVYYCAGSYYSY |
| | | DVLDYWGQGTTVTVSSGGGGSGGGGSGGGGSGG |
| | | GGSDIQMTQSPSFLSASVGDRVTITCKASQNVGINV |
| | | VWHQQKPGKAPKALIYSSSHRYSGVPSRFSGSGSG |
| | | TEFTLTISSLQPEDFATYFCQQFKSYPLTFGQGTKL |
| | | EIk |
| SEQ ID NO: | VH | QVQLVQSGAEVKKPGSSVKVSCKASGYSFRLTYIH |
| 223 | | WVRQAPGQGLEWMGWFFPGSGNIKYNEKFKGRV |
| | | TITADTSTSTAYMELSSLRSEDTAVYYCAGSYYSY |
| | | DVLDYWGQGTTVTVSS |
| A-H.54 | | |
| SEQ ID NO: | VH + VL | QVQLVQSGAEVKKPGSSVKVSCKASGYSFHNWYI |
| 224 | | HWVRQAPGQGLEWMGWFFPGSGNIKYNEKFKGR |
| | | VTITADTSTSTAYMELSSLRSEDTAVYYCAGSYYS |
| | | YDVLDYWGQGTTVTVSSGGGGSGGGGSGGGGSG |
| | | GGGSDIQMTQSPSFLSASVGDRVTITCKASQNVGIN |
| | | VVWHQQKPGKAPKALIYSSSHRYSGVPSRFSGSGS |
| | | GTEFTLTISSLQPEDFATYFCQQFKSYPLTFGQGTK |
| | | LEIK |
| SEQ ID NO: | VH | QVQLVQSGAEVKKPGSSVKVSCKASGYSFHNWYI |
| 225 | | HWVRQAPGQGLEWMGWFFPGSGNIKYNEKFKGR |
| | | VTITADTSTSTAYMELSSLRSEDTAVYYCAGSYYS |
| | | YDVLDYWGQGTTVTVSS |
| A-H.55 antibody | | |
| SEQ ID NO: 3 | HC CDR1 (Combined) | GYSFTTYYIH |
| SEQ ID NO: 4 | HC CDR2 (Combined) | WFFPGSGNIKYNEKFKG |
| SEQ ID NO: 5 | HC CDR3 (Combined) | SYYSYDVLDY |
| SEQ ID NO: 45 | HC CDR1 (Kabat) | TYYIH |
| SEQ ID NO: 46 | HC CDR2 (Kabat) | WFFPGSGNIKYNEKFKG |
| SEQ ID NO: 47 | HC CDR3 (Kabat) | SYYSYDVLDY |
| SEQ ID NO: 48 | HC CDR1 (Chothia) | GYSFTTY |
| SEQ ID NO: 49 | HC CDR2 (Chothia) | FPGSGN |
| SEQ ID NO: 50 | HC CDR3 (Chothia) | SYYSYDVLDY |
| SEQ ID NO: | VH | QVQLVQSGAEVKKPGSSVKVSCKASGYSFTTYYIH |
| 1100 | | WVRQAPGQGLEWMGWFFPGSGNIKYNEKFKGRV |
| | | TITADTSTSTAYMELSSLRSEDTAVYYCAGSYYSY |
| | | DVLDYWGQGTTVTVSS |
| SEQ ID NO: 6 | LC CDR1 (Combined) | KASQNVGINVV |
| SEQ ID NO: 7 | LC CDR2 (Combined) | SSSHRYS |
| SEQ ID NO: 8 | LC CDR3 (Combined) | QQFKSYPLT |
| SEQ ID NO: 51 | LC CDR1 (Kabat) | KASQNVGINVV |
| SEQ ID NO: 52 | LC CDR2 (Kabat) | SSSHRYS |
| SEQ ID NO: 53 | LC CDR3 (Kabat) | QQFKSYPLT |
| SEQ ID NO: 54 | LC CDR1 (Chothia) | KASQNVGINVV |
| SEQ ID NO: 55 | LC CDR2 (chothia) | SSSHRYS |
| SEQ ID NO: 56 | LC CDR3 (chothia) | QQFKSYPLT |
| SEQ ID NO: | VL | QSVLTQPPSVSEAPRQRVTISCKASQNVGINVVWH |
| 1101 | | QQLPGKAPKALIYSSSHRYSGVSDRFSGSGSGTSFS |
| | | LAISGLQSEDEADYFCQQFKSYPLTFGTGTKVTVL |
| A-H.56 | | |
| SEQ ID NO: | VH + VL (ScFv) | QVQLVQSGAEVKKPGSSVKVSCKASGHDFDKFYI |
| 1309 | | HWVRQAPGQGLEWMGRVSAGSGNVKYNEKFKG |
| | | RVTITADTSTSTAYMELSSLRSEDTAVYYCAGSYY |
| | | SYDVLDYWGQGTTVTVSSGGGGSGGGGSGGGGS |
| | | GGGGSDIQMTQSPSFLSASVGDRVTITCKASQNVG |
| | | NRVAWYQQKPGKAPKALIYSSSHRYKGVPSRFSG |
| | | SGSGTEFTLTISSLQPEDFATYFCQQFKSYPLTFGQ |
| | | GTKLEIK |
| A-H.57 | | |
| SEQ ID NO: | VH + VL (ScFv) | QVQLVQSGAEVKKPGSSVKVSCKASGHDFRLTYI |
| 1326 | | HWVRQAPGQGLEWMGRVSAGSGNTKYNEKFKG |
| | | RVTITADTSTSTAYMELSSLRSEDTAVYYCAVSYY |
| | | SYDVLDYWGQGTTVTVSSGGGGSGGGGSGGGGS |
| | | GGGGSDIQMTQSPSFLSASVGDRVTITCKASQNVG |
| | | DRVVWHQQKPGKAPKALIYSSSHRYKGVPSRFSG |
| | | SGSGTEFTLTISSLQPEDFATYFCQQFKSYPLTFGQ |
| | | GTKLEIK |
| A-H.58 | | |
| SEQ ID NO: | VH + VL (ScFv) | QVQLVQSGAEVKKPGSSVKVSCKASGHDFRLTYI |
| 1327 | | HWVRQAPGQGLEWMGRVSAGSGNVKYNEKFKG |
| | | RVTITADTSTSTAYMELSSLRSEDTAVYYCAVSYY |
| | | SYDVLDYWGQGTTVTVSSGGGGSGGGGSGGGGS |
| | | GGGGSDIQMTQSPSFLSASVGDRVTITCKASQNVG |
| | | VNRVVWHQQKPGKAPKALIYSSSHRYKGVPSRFSG |
| | | SGSGTEFTLTISSLQPEDFATYFCQQFKSYPLTFGQ |
| | | VGTKLEIK |
| A-H.59 | | |
| SEQ ID NO: | VH + VL (ScFv) | QVQLVQSGAEVKKPGSSVKVSCKASGHDFRLTYI |
| 1328 | | HWVRQAPGQGLEWMGRIYAGSGNVKYNEKFKGR |
| | | VTITADTSTSTAYMELSSLRSEDTAVYYCAVSYYS |
| | | YDVLDYWGQGTTVTVSSGGGGSGGGGSGGGGSG |
| | | GGGSDIQMTQSPSFLSASVGDRVTITCKASQNVAD |
| | | RVVWHQQKPGKAPKALIYSSSHRYKGVPSRFSGS |
| | | GSGTEFTLTISSLQPEDFATYFCQQFKSYPLTFGQG |
| | | TKLEIK |
| A-H.60 | | |
| SEQ ID NO: | VH + VL (ScFv) | QVQLVQSGAEVKKPGSSVKVSCKASGHDFKLTYI |
| 1329 | | HWVRQAPGQGLEWMGRVSAGSGNTKYNEKFKG |
| | | RVTITADTSTSTAYMELSSLRSEDTAVYYCAVSYY |
| | | SYDVLDYWGQGTTVTVSSGGGGSGGGGSGGGGS |
| | | GGGGSDIQMTQSPSFLSASVGDRVTITCKASQNVG |
| | | DRVAWHQQKPGKAPKALIYSSSHRYKGVPSRFSG |
| | | SGSGTEFTLTISSLQPEDFATYFCQQFKSYPLTFGQ |
| | | GTKLEIK |
| A-H.61 | | |
| SEQ ID NO: | VH + VL (ScFv) | QVQLVQSGAEVKKPGSSVKVSCKASGHDFKLTYI |
| 1330 | | HWVRQAPGQGLEWMGRVSAGSGNTKYNEKFKG |
| | | RVTITADTSTSTAYMELSSLRSEDTAVYYCAVSYY |
| | | SYDVLDYWGQGTTVTVSSGGGGSGGGGSGGGGS |
| | | GGGGSDIQMTQSPSFLSASVGDRVTITCKASQNVD |
| | | NRVAWHQQKPGKAPKALIYSSSHRYKGVPSRFSG |
| | | SGSGTEFTLTISSLQPEDFATYFCQQFKSYPLTFGQ |
| | | GTKLEIK |
| A-H.62 | | |
| SEQ ID NO: | VH + VL (ScFv) | QVQLVQSGAEVKKPGSSVKVSCKASGHDFRLTYI |
| 1331 | | HWVRQAPGQGLEWMGRVSAGSGNVKYNEKFKG |
| | | RVTITADTSTSTAYMELSSLRSEDTAVYYCAVSYY |
| | | SYDVLDYWGQGTTVTVSSGGGGSGGGGSGGGGS |
| | | GGGGSDIQMTQSPSFLSASVGDRVTITCKASQNVA |
| | | DRVVWHQQKPGKAPKALIYSSSHRYKGVPSRFSG |
| | | SGSGTEFTLTISSLQPEDFATYFCQQFKSYPLTFGQ |
| | | GTKLEIK |
| A-H.63 | | |
| SEQ ID NO: | VH + VL (ScFv) | QVQLVQSGAEVKKPGSSVKVSCKASGHDFRLTYI |
| 1332 | | HWVRQAPGQGLEWMGRVYAGSGNTKYNEKFKG |
| | | RVTITADTSTSTAYMELSSLRSEDTAVYYCAVSYY |
| | | SYDVLDYWGQGTTVTVSSGGGGSGGGGSGGGGS |
| | | GGGGSDIQMTQSPSFLSASVGDRVTITCKASQNVE |
| | | DRVVWHQQKPGKAPKALIYSSSHRYKGVPSRFSG |
| | | SGSGTEFTLTISSLQPEDFATYFCQQFKSYPLTFGQ |
| | | GTKLEIK |
| A-H.64 | | |
| SEQ ID NO: | VH + VL (ScFv) | QVQLVQSGAEVKKPGSSVKVSCKASGHDFKLTYI |
| 1333 | | HWVRQAPGQGLEWMGRVSAGSGNTKYNEKFKG |
| | | RVTITADTSTSTAYMELSSLRSEDTAVYYCAVSYY |
| | | SYDVLDYWGQGTTVTVSSGGGGSGGGGSGGGGS |
| | | GGGGSDIQMTQSPSFLSASVGDRVTITCKASQNVA |
| | | DRVVWHQQKPGKAPKALIYSSSHRYKGVPSRFSG |
| | | SGSGTEFTLTISSLQPEDFATYFCQQFKSYPLTFGQ |
| | | GTKLEIK |
| A-H.65 | | |
| SEQ ID NO: | VH + VL (ScFv) | QVQLVQSGAEVKKPGSSVKVSCKASGHDFKLTYI |
| 1334 | | HWVRQAPGQGLEWMGRISAGSGNTKYNEKFKGR |
| | | VTITADTSTSTAYMELSSLRSEDTAVYYCAVSYYS |
| | | YDVLDYWGQGTTVTVSSGGGGSGGGGSGGGGSG |
| | | GGGSDIQMTQSPSFLSASVGDRVTITCKASQNVGD |
| | | RVVWHQQKPGKAPKALIYSSSHRYKGVPSRFSGS |
| | | GSGTEFTLTISSLQPEDFATYFCQQFKSYPLTFGQG |
| | | TKLEIK |
| A-H.66 | | |
| SEQ ID NO: | VH + VL (ScFv) | QVQLVQSGAEVKKPGSSVKVSCKASGHDFKLTYI |
| 1335 | | HWVRQAPGQGLEWMGRIYAGSGNTKYNEKFKGR |
| | | VTITADTSTSTAYMELSSLRSEDTAVYYCAVSYYS |
| | | YDVLDYWGQGTTVTVSSGGGGSGGGGSGGGGSG |
| | | GGGSDIQMTQSPSFLSASVGDRVTITCKASQNVGD |
| | | RVVWHQQKPGKAPKALIYSSSHRYKGVPSRFSGS |
| | | GSGTEFTLTISSLQPEDFATYFCQQFKSYPLTFGQG |
| | | TKLEIK |
| A-H.67 | | |
| SEQ ID NO: | VH + VL (ScFv) | QVQLVQSGAEVKKPGSSVKVSCKASGTDFKLTYIH |
| 1336 | | WVRQAPGQGLEWMGRIFPGSGNVKYNEKFKGRV |
| | | TITADTSTSTAYMELSSLRSEDTAVYYCAVSYYSY |
| | | DVLDYWGQGTTVTVSSGGGGSGGGGSGGGGSGG |
| | | GGSDIQMTQSPSFLSASVGDRVTITCKASQNVDNR |
| | | VAWYQQKPGKAPKALIYSSSHRYKGVPSRFSGSGS |
| | | GTEFTLTISSLQPEDFATYFCQQFKSYPLTFGQGTK |
| | | LEIK |
| A-H.68 | | |
| SEQ ID NO: | VH + VL (ScFv) | QVQLVQSGAEVKKPGSSVKVSCKASGHDFRLTYI |
| 1337 | | HWVRQAPGQGLEWMGRISAGSGNVKYNEKFKGR |
| | | VTITADTSTSTAYMELSSLRSEDTAVYYCAVSYYS |
| | | YDVLDYWGQGTTVTVSSGGGGSGGGGSGGGGSG |
| | | GGGSDIQMTQSPSFLSASVGDRVTITCKASQNVAD |
| | | RVAWYQQKPGKAPKALIYSSSHRYKGVPSRFSGS |
| | | GSGTEFTLTISSLQPEDFATYFCQQFKSYPLTFGQG |
| | | TKLEIK |
| A-H.69 | | |
| SEQ ID NO: | VH + VL (ScFv) | QVQLVQSGAEVKKPGSSVKVSCKASGTDFKLTYIH |
| 1344 | | WVRQAPGQGLEWMGRIFPGSGNVKYNEKFKGRV |
| | | TITADTSTSTAYMELSSLRSEDTAVYYCAGSYYSY |
| | | DVLDYWGQGTTVTVSSGGGGSGGGGSGGGGSGG |
| | | GGSDIQMTQSPSFLSASVGDRVTITCKASQNVDNR |
| | | VAWYQQKPGKAPKALIYSSSHRYKGVPSRFSGSGS |
| | | GTEFTLTISSLQPEDFATYFCQQFKSYPLTFGQGTK |
| | | LEIK |

A-H humanized-matured VH

| | | |
|---|---|---|
| SEQ ID NO: | VH-humanized | QVQLVQSGAEVKKPGSSVKVSCKASGTDFKLTYIH |
| 1310 | matured 1 | WVRQAPGQGLEWMGRIFPGSGNVKYNEKFKGRV |
| | | TITADTSTSTAYMELSSLRSEDTAVYYCAGSYYSY |
| | | DVLDYWGQGTTVTVSS |
| SEQ ID NO: | VH-humanized | QVQLVQSGAEVKKPGSSVKVSCKASGTDFKLTYIH |
| 1311 | matured 2 | WVRQAPGQGLEWMGRIFPGSGNVKYNEKFKGRV |
| | | TITADTSTSTAYMELSSLRSEDTAVYYCAVSYYSY |
| | | DVLDYWGQGTTVTVSS |
| SEQ ID NO: | VH-humanized | QVQLVQSGAEVKKPGSSVKVSCKASGHDFRLTYI |
| 1312 | matured 3 | HWVRQAPGQGLEWMGRISAGSGNVKYNEKFKGR |
| | | VTITADTSTSTAYMELSSLRSEDTAVYYCAVSYYS |
| | | YDVLDYWGQGTTVTVSS |

A-H humanized-matured VL

| | | |
|---|---|---|
| SEQ ID NO: | VL-humanized matured | DIQMTQSPSFLSASVGDRVTITCKASQNVDNRVAW |
| 1313 | 1 | YQQKPGKAPKALIYSSSHRYKGVPSRFSGSGSGTE |
| | | FTLTISSLQPEDFATYFCQQFKSYPLTFGQGTKLEIK |
| SEQ ID NO: | VL-humanized matured | DIQMTQSPSFLSASVGDRVTITCKASQNVADRVAW |
| 1314 | 2 | YQQKPGKAPKALIYSSSHRYKGVPSRFSGSGSGTE |
| | | FTLTISSLQPEDFATYFCQQFKSYPLTFGQGTKLEIK |

[0646] In some embodiments, the anti-TCRβV antibody molecule, e.g., anti-TCRβ V6 (e.g., anti-TCRβ V6-5*01) antibody molecule comprises a VH and/or a VL of an antibody described in Table 1A, or a sequence with at least 80%, 85%, 90%, 95%, 96%, 97%, 98%, 99% or more identity thereto.

[0647] In some embodiments, the anti-TCRβV antibody molecule, e.g., anti-TCRβ V6 (e.g., anti-TCRβ V6-5*01) antibody molecule comprises a VH and a VL of an antibody described in Table 1A, or a sequence with at least 80%, 85%, 90%, 95%, 96%, 97%, 98%, 99% or more identity thereto.

[0648] In some embodiments, an anti-TCRVb antibody disclosed herein has an antigen binding domain having a VL having a consensus sequence of SEQ ID NO: 230, wherein position 30 is G, E, A or D; position 31 is N or D; position 32 is R or K; position 36 is Y or H; and/or position 56 is K or S.

[0649] In some embodiments, an anti-TCRVb antibody disclosed herein has an antigen binding domain having a VH having a consensus sequence of SEQ ID NO: 231, wherein: position 27 is H or T or G or Y; position 28 is D or T or S; position 30 is H or R or D or K or T; position 31 is L or D or K or T or N; position 32 is W or F or T or I or Y or G; position 49 is R or W; position 50 is V or I or F; position 51 is F or S or Y; position 52 is A or P; position 56 is N or S; position 57 is T or V or Y or I; position 58 is K or R; position 97 is G or V; position 99 is Y or I; position 102 is Y or A; and/or position 103 is D or G.

### Anti-TCRβ V12 Antibodies

[0650] Accordingly, in one aspect, the disclosure provides an anti-TCRβV antibody molecule that binds to human TCRβ V12, e.g., a TCRβ V12 subfamily comprising: TCRβ V12-4*01, TCRβ V12-3*01 or TCRβ V12-5*01. In some embodiments the TCRβ V12 subfamily comprises TCRβ V12-4*01. In some embodiments the TCRβ V12 subfamily comprises TCRβ V12-3*01.

[0651] In some embodiments, the anti-TCRβV antibody molecule, e.g., anti-TCRβ V12 antibody molecule, is a non-murine antibody molecule, e.g., a human or humanized antibody molecule. In some embodiments, the anti-TCRβV antibody molecule, e.g., anti-TCRβ V12 antibody molecule is a human antibody molecule. In some embodiments, the anti-TCRβV antibody molecule, e.g., anti-TCRβ V12 antibody molecule is a humanized antibody molecule.

[0652] In some embodiments, the anti-TCRβV antibody molecule, e.g., anti-TCRβ V12 antibody molecule, is isolated or recombinant.

[0653] In some embodiments, the anti-TCRβV antibody molecule, e.g., anti-TCRβ V12 antibody molecule, comprises at least one antigen-binding region, e.g., a variable region or an antigen-binding fragment thereof, from an antibody described herein, e.g., an antibody described in Table 2A, or encoded by a nucleotide sequence in Table 2A, or a sequence substantially identical (e.g., at least 80%, 85%, 90%, 92%, 95%, 97%, 98%, 99% or higher identical) to any of the aforesaid sequences.

[0654] In some embodiments, the anti-TCRβV antibody molecule, e.g., anti-TCRβ V12 antibody molecule, comprises at least one, two, three or four variable regions from an antibody described herein, e.g., an antibody as described in Table 2A, or encoded by a nucleotide sequence in Table 2A, or a sequence substantially identical (e.g., at least 80%, 85%, 90%, 92%, 95%, 97%, 98%, 99% or higher identical) to any of the aforesaid sequences.

[0655] In some embodiments, the anti-TCRβV antibody molecule, e.g., anti-TCRβ V12 antibody molecule, comprises at least one or two heavy chain variable regions from an antibody described herein, e.g., an antibody as described in Table 2A, or encoded by a nucleotide sequence in Table 2A, or a sequence substantially identical (e.g., at least 80%, 85%, 90%, 92%, 95%, 97%, 98%, 99% or higher identical) to any of the aforesaid sequences.

[0656] In some embodiments, the anti-TCRβV antibody molecule, e.g., anti-TCRβ V12 antibody molecule, comprises at least one or two light chain variable regions from an antibody described herein, e.g., an antibody as described in Table 2A, or encoded by a nucleotide sequence in Table 2A, or a sequence substantially identical (e.g., at least 80%, 85%, 90%, 92%, 95%, 97%, 98%, 99% or higher identical) to any of the aforesaid sequences.

[0657] In some embodiments, the anti-TCRβV antibody molecule, e.g., anti-TCRβ V12 antibody molecule, comprises a heavy chain constant region for an IgG4, e.g., a human IgG4. In still another embodiment, the anti-TCRβV antibody molecule, e.g., anti-TCRβ V12 antibody molecule, includes a heavy chain constant region for an IgG1, e.g., a human IgG1. In one embodiment, the heavy chain constant region comprises an amino sequence set forth in Table 3A, or a sequence substantially identical (e.g., at least 80%, 85%, 90%, 92%, 95%, 97%, 98%, 99% or higher identical) thereto.

[0658] In some embodiments, the anti-TCRβV antibody molecule, e.g., anti-TCRβ V12 antibody molecule, includes a kappa light chain constant region, e.g., a human kappa light chain constant region. In one embodiment, the light chain constant region comprises an amino sequence set forth in Table 3A, or a sequence substantially identical (e.g., at least 80%, 85%, 90%, 92%, 95%, 97%, 98%, 99% or higher identical) thereto.

[0659] In some embodiments, the anti-TCRβV antibody molecule, e.g., anti-TCRβ V12 antibody molecule, includes at least one, two, or three complementarity determining regions (CDRs) from a heavy chain variable region of an antibody described herein, e.g., an antibody as described in Table 2A, or encoded by the nucleotide sequence in Table 2A, or a sequence substantially identical (e.g., at least 80%, 85%, 90%, 92%, 95%, 97%, 98%, 99% or higher identical) to any of the aforesaid sequences.

[0660] In some embodiments, the anti-TCRβV antibody molecule, e.g., anti-TCRβ V12 antibody molecule, includes at least one, two, or three CDRs (or collectively all of the CDRs) from a heavy chain variable region comprising an amino acid sequence shown in Table 2A, or encoded by a nucleotide sequence shown in Table 2A. In one embodiment, one or more of the CDRs (or collectively all of the CDRs) have one, two, three, four, five, six or more changes, e.g., amino acid substitutions or deletions, relative to the amino acid sequence shown in Table 2A, or encoded by a nucleotide sequence shown in Table 2A.

[0661] In some embodiments, the anti-TCRβV antibody molecule, e.g., anti-TCRβ V12 antibody molecule, includes at least one, two, or three complementarity determining regions (CDRs) from a light chain variable region of an antibody described herein, e.g., an antibody as described in Table 2A, or encoded by the nucleotide sequence in Table 2A, or a sequence substantially identical (e.g., at least 80%, 85%, 90%, 92%, 95%, 97%, 98%, 99% or higher identical) to any of the aforesaid sequences.

[0662] In some embodiments, the anti-TCRβV antibody molecule, e.g., anti-TCRβ V12 antibody molecule, includes at least one, two, or three CDRs (or collectively all of the CDRs) from a light chain variable region comprising an amino acid sequence shown in Table 2A, or encoded by a nucleotide sequence shown in Table 2A. In one embodiment, one or more of the CDRs (or collectively all of the CDRs) have one, two, three, four, five, six or more changes, e.g., amino acid substitutions or deletions, relative to the amino acid sequence shown in Table 2A, or encoded by a nucleotide sequence shown in Table 2A.

[0663] In some embodiments, the anti-TCRβV antibody molecule, e.g., anti-TCRβ V12 antibody molecule, includes at least one, two, three, four, five or six CDRs (or collectively all of the CDRs) from a heavy and light chain variable region comprising an amino acid sequence shown in Table 2A, or encoded by a nucleotide sequence shown in Table 2A. In one embodiment, one or more of the CDRs (or collectively all of the CDRs) have one, two, three, four, five, six or more changes, e.g., amino acid substitutions or deletions, relative to the amino acid sequence shown in Table 2A, or encoded by a nucleotide sequence shown in Table 2A.

[0664] In some embodiments, the anti-TCRβV antibody molecule, e.g., anti-TCRβ V12 antibody molecule, molecule includes all six CDRs from an antibody described herein, e.g., an antibody as described in Table 2A, or encoded by the nucleotide sequence in Table 2A, or closely related CDRs, e.g., CDRs which are identical or which have at least one amino acid alteration, but not more than two, three or four alterations (e.g., substitutions, deletions, or insertions, e.g., conservative substitutions). In some embodiments, the anti-TCRβV antibody molecule, e.g., anti-TCRβ V12 antibody molecule, may include any CDR described herein.

[0665] In some embodiments, the anti-TCRβV antibody molecule, e.g., anti-TCRβ V12 antibody molecule includes at least one, two, or three CDRs according to Kabat et al. (e.g., at least one, two, or three CDRs according to the Kabat definition as set out in Table 2A) from a heavy chain variable region of an antibody described herein, e.g., an antibody chosen as described in Table 2A, or a sequence substantially identical (e.g., at least 80%, 85%, 90%, 92%, 95%, 97%, 98%, 99% or higher identical) to any of the aforesaid sequences; or which have at least one amino acid alteration, but not more than two, three or four alterations (e.g., substitutions, deletions, or insertions, e.g., conservative substitutions) relative to one, two, or three CDRs according to Kabat et al. shown in Table 2A.

[0666] In some embodiments, the anti-TCRβV antibody molecule, e.g., anti-TCRβ V12 antibody molecule includes at least one, two, or three CDRs according to Kabat et al. (e.g., at least one, two, or three CDRs according to the Kabat definition as set out in Table 2A) from a light chain variable region of an antibody described herein, e.g., an antibody as described in Table 2A, or a sequence substantially identical (e.g., at least 80%, 85%, 90%, 92%, 95%, 97%, 98%, 99% or higher identical) to any of the aforesaid sequences; or which have at least one amino acid alteration, but not more than two, three or four alterations (e.g., substitutions, deletions, or insertions, e.g., conservative substitutions) relative to one, two, or three CDRs according to Kabat et al. shown in Table 2A.

[0667] In some embodiments, the anti-TCRβV antibody molecule, e.g., anti-TCRβ V12 antibody molecule includes at least one, two, three, four, five, or six CDRs according to Kabat et al. (e.g., at least one, two, three, four, five, or six CDRs according to the Kabat definition as set out in Table 2A) from the heavy and light chain variable regions of an antibody described herein, e.g., an antibody as described in Table 2A, or encoded by the nucleotide sequence in Table 2A; or a sequence substantially identical (e.g., at least 80%, 85%, 90%, 92%, 95%, 97%, 98%, 99% or higher identical) to any of the aforesaid sequences; or which have at least one amino acid alteration, but not more than two, three or four alterations (e.g., substitutions, deletions, or insertions, e.g., conservative substitutions) relative to one, two, three, four, five, or six CDRs according to Kabat et al. shown in Table 2A.

[0668] In some embodiments, the anti-TCRβV antibody molecule, e.g., anti-TCRβ V12 antibody molecule includes all six CDRs according to Kabat et al. (e.g., all six CDRs according to the Kabat definition as set out in Table 2A) from the heavy and light chain variable regions of an antibody described herein, e.g., an antibody as described in Table 2A, or encoded by the nucleotide sequence in Table 2A; or encoded by the nucleotide sequence in Table 2A; or a sequence substantially identical (e.g., at least 80%, 85%, 90%, 92%, 95%, 97%, 98%, 99% or higher identical) to any of the aforesaid sequences; or which have at least one amino acid alteration, but not more than two, three or four alterations (e.g., substitutions, deletions, or insertions, e.g., conservative substitutions) relative to all six CDRs according to Kabat et al. shown in Table 2A. In some embodiments, the anti-TCRβV antibody molecule, e.g., anti-TCRβ V12 antibody molecule may include any CDR described herein.

[0669] In some embodiments, the anti-TCRβV antibody molecule, e.g., anti-TCRβ V12 antibody molecule includes at least one, two, or three hypervariable loops that have the same canonical structures as the corresponding hypervariable loop of an antibody described herein, e.g., an antibody described in Table 2A, e.g., the same canonical structures as at least loop 1 and/or loop 2 of the heavy and/or light chain variable domains of an antibody described herein. See, e.g., Chothia et al., (1992) J. Mol. Biol. 227:799-817; Tomlinson et al., (1992) J. Mol. Biol. 227:776-798 for descriptions of hypervariable loop canonical structures. These structures can be determined by inspection of the tables described in these references.

[0670] In some embodiments, the anti-TCRβV antibody molecule, e.g., anti-TCRβ V12 antibody molecule includes at least one, two, or three CDRs according to Chothia et al. (e.g., at least one, two, or three CDRs according to the Chothia definition as set out in Table 2A) from a heavy chain variable region of an antibody described herein, e.g., an antibody chosen as described in Table 2A, or a sequence substantially identical (e.g., at least 80%, 85%, 90%, 92%, 95%, 97%, 98%, 99% or higher identical) to any of the aforesaid sequences; or which have at least one amino acid alteration, but not more than two, three or four alterations (e.g., substitutions, deletions, or insertions, e.g., conservative substitutions) relative to one, two, or three CDRs according to Chothia et al. shown in Table 2A.

[0671] In some embodiments, the anti-TCRβV antibody molecule, e.g., anti-TCRβ V12 antibody molecule includes at least one, two, or three CDRs according to Chothia et al. (e.g., at least one, two, or three CDRs according to the Chothia definition as set out in Table 2A) from a light chain variable region of an antibody described herein, e.g., an antibody as described in Table 2A, or a sequence substantially identical (e.g., at least 80%, 85%, 90%, 92%, 95%, 97%, 98%, 99% or higher identical) to any of the aforesaid sequences; or which have at least one amino acid alteration, but not more than two, three or four alterations (e.g., substitutions, deletions, or insertions, e.g., conservative substitutions) relative to one, two, or three CDRs according to Chothia et al. shown in Table 2A.

[0672] In some embodiments, the anti-TCRβV antibody molecule, e.g., anti-TCRβ V12 antibody molecule includes at least one, two, three, four, five, or six CDRs according to Chothia et al. (e.g., at least one, two, three, four, five, or six CDRs according to the Chothia definition as set out in Table 2A) from the heavy and light chain variable regions of an antibody described herein, e.g., an antibody as described in Table 2A, or encoded by the nucleotide sequence in Table 2A; or a sequence substantially identical (e.g., at least 80%, 85%, 90%, 92%, 95%, 97%, 98%, 99% or higher identical) to any of the aforesaid sequences; or which have at least one amino acid alteration, but not more than two, three or four alterations (e.g., substitutions, deletions, or insertions, e.g., conservative substitutions) relative to one, two, three, four, five, or six CDRs according to Chothia et al. shown in Table 2A.

[0673] In some embodiments, the anti-TCRβV antibody molecule, e.g., anti-TCRβ V12 antibody molecule includes all six CDRs according to Chothia et al. (e.g., all six CDRs according to the Chothia definition as set out in Table 2A) from the heavy and light chain variable regions of an antibody described herein, e.g., an antibody as described in Table 2A, or encoded by the nucleotide sequence in Table 2A; or encoded by the nucleotide sequence in Table 2A; or a sequence substantially identical (e.g., at least 80%, 85%, 90%, 92%, 95%, 97%, 98%, 99% or higher identical) to any of the aforesaid sequences; or which have at least one amino acid alteration, but not more than two, three or four alterations (e.g., substitutions, deletions, or insertions, e.g., conservative substitutions) relative to all six CDRs according to Chothia et al. shown in Table 2A. In some embodiments, the anti-TCRβV antibody molecule, e.g., anti-TCRβ V12 antibody molecule may include any CDR described herein.

[0674] In some embodiments, the anti-TCRβV antibody molecule, e.g., anti-TCRβ V12 antibody molecule includes at least one, two, or three CDRs according to a combined CDR (e.g., at least one, two, or three CDRs according to the combined CDR definition as set out in Table 2A) from a heavy chain variable region of an antibody described herein, e.g., an antibody chosen as described in Table 2A, or a sequence substantially identical (e.g., at least 80%, 85%, 90%, 92%, 95%, 97%, 98%, 99% or higher identical) to any of the aforesaid sequences; or which have at least one amino acid alteration, but not more than two, three or four alterations (e.g., substitutions, deletions, or insertions, e.g., conservative substitutions) relative to one, two, or three CDRs according to combined CDR shown in Table 2A.

[0675] In some embodiments, the anti-TCRβV antibody molecule, e.g., anti-TCRβ V12 antibody molecule includes at least one, two, or three CDRs according to a combined CDR (e.g., at least one, two, or three CDRs according to the combined CDR definition as set out in Table 2A) from a light chain variable region of an antibody described herein, e.g., an antibody as described in Table 2A, or a sequence substantially identical (e.g., at least 80%, 85%, 90%, 92%, 95%, 97%, 98%, 99% or higher identical) to any of the aforesaid sequences; or which have at least one amino acid alteration, but not more than two, three or four alterations (e.g., substitutions, deletions, or insertions, e.g., conservative substitutions) relative to one, two, or three CDRs according to a combined CDR shown in Table 2A.

[0676] In some embodiments, the anti-TCRβV antibody molecule, e.g., anti-TCRβ V12 antibody molecule includes at least one, two, three, four, five, or six CDRs according to a combined CDR. (e.g., at least one, two, three, four, five, or six CDRs according to the combined CDR definition as set out in Table 2A) from the heavy and light chain variable regions of an antibody described herein, e.g., an antibody as described in Table 2A, or encoded by the nucleotide sequence in Table 2A; or a sequence substantially identical (e.g., at least 80%, 85%, 90%, 92%, 95%, 97%, 98%, 99% or higher identical) to any of the aforesaid sequences; or which have at least one amino acid alteration, but not more than two, three or four alterations (e.g., substitutions, deletions, or insertions, e.g., conservative substitutions) relative to one, two, three, four, five, or six CDRs according to a combined CDR shown in Table 2A.

[0677] In some embodiments, the anti-TCRβV antibody molecule, e.g., anti-TCRβ V12 antibody molecule includes all six CDRs according to a combined CDR (e.g., all six CDRs according to the combined CDR definition as set out in Table 2A) from the heavy and light chain variable regions of an antibody described herein, e.g., an antibody as described in Table 2A, or encoded by the nucleotide sequence in Table 2A; or encoded by the nucleotide sequence in Table 2A; or a sequence substantially identical (e.g., at least 80%, 85%, 90%, 92%, 95%, 97%, 98%, 99% or higher identical) to any of the aforesaid sequences; or which have at least one amino acid alteration, but not more than two, three or four alterations (e.g., substitutions, deletions, or insertions, e.g., conservative substitutions) relative to all six CDRs according to a combined CDR shown in Table 2A. In some embodiments, the anti-TCRβV antibody molecule, e.g., anti-TCRβ V12 antibody molecule may include any CDR described herein.

[0678] In some embodiments, a combined CDR as set out in Table 1A is a CDR that comprises a Kabat CDR and a Chothia CDR.

[0679] In some embodiments, the anti-TCRβV antibody molecule, e e.g., anti-TCRβ V12 antibody molecule, molecule includes a combination of CDRs or hypervariable loops identified as combined CDRs in Table 1A. In some embodiments, the anti-TCRβV antibody molecule, e.g., anti-TCRβ V12 antibody molecule, can contain any combination of CDRs or hypervariable loops according the “combined” CDRs are described in Table 1A.

[0680] In some embodiments, the anti-TCRβV antibody molecule, e.g., anti-TCRβ V12 antibody molecule includes a combination of CDRs or hypervariable loops defined according to the Kabat et al. and Chothia et al., or as described in Table 1A

[0681] In some embodiments, the anti-TCRβV antibody molecule, e.g., anti-TCRβ V12 antibody molecule can contain any combination of CDRs or hypervariable loops according to the Kabat and Chothia definitions.

[0682] In an embodiment, e.g., an embodiment comprising a variable region, a CDR (e.g., a combined CDR, Chothia CDR or Kabat CDR), or other sequence referred to herein, e.g., in Table 2A, the antibody molecule is a monospecific antibody molecule, a bispecific antibody molecule, a bivalent antibody molecule, a biparatopic antibody molecule, or an antibody molecule that comprises an antigen binding fragment of an antibody, e.g., a half antibody or antigen binding fragment of a half antibody. In certain embodiments the antibody molecule comprises a multispecific molecule, e.g., a bispecific molecule, e.g., as described herein.

[0683] In some embodiments, the anti-TCRβV antibody molecule, e.g., anti-TCRβ V12 antibody molecule includes:

(i) one, two or all of a light chain complementarity determining region 1 (LC CDR1), a light chain complementarity determining region 2 (LC CDR2), and a light chain complementarity determining region 3 (LC CDR3) of SEQ ID NO: 16, SEQ ID NO: 26, SEQ ID NO: 27, SEQ ID NO: 28, SEQ ID NO: 29 or SEQ ID NO: 30, and/or
(ii) one, two or all of a heavy chain complementarity determining region 1 (HC CDR1), heavy chain complementarity determining region 2 (HC CDR2), and a heavy chain complementarity determining region 3 (HC CDR3) of SEQ ID NO: 15, SEQ ID NO: 23, SEQ ID NO: 24, or SEQ ID NO: 25.

[0684] In some embodiments, the anti-TCRβV antibody molecule, e.g., anti-TCRβ V12 antibody molecule comprises:

(i) a LC CDR1 amino acid sequence of SEQ ID NO: 20, a LC CDR2 amino acid sequence of SEQ ID NO: 21, or a LC CDR3 amino acid sequence of SEQ ID NO: 22; and/or
(ii) a HC CDR1 amino acid sequence of SEQ ID NO: 17, a HC CDR2 amino acid sequence of SEQ ID NO: 18, or a HC CDR3 amino acid sequence of SEQ ID NO: 19.

[0685] In some embodiments, the anti-TCRβV antibody molecule, e.g., anti-TCRβ V12 antibody molecule comprises:

(i) a light chain variable region (VL) comprising a LC CDR1 amino acid sequence of SEQ ID NO: 20, a LC CDR2 amino acid sequence of SEQ ID NO: 21, and a LC CDR3 amino acid sequence of SEQ ID NO: 2; and/or
(ii) a heavy chain variable region (VH) comprising a HC CDR1 amino acid sequence of SEQ ID NO: 17, a HC CDR2 amino acid sequence of SEQ ID NO: 18, and a HC CDR3 amino acid sequence of SEQ ID NO: 19.

[0686] In some embodiments, the anti-TCRβV antibody molecule, e.g., anti-TCRβ V12 antibody molecule comprises:

(i) a LC CDR1 amino acid sequence of SEQ ID NO: 63, a LC CDR2 amino acid sequence of SEQ ID NO: 64, or a LC CDR3 amino acid sequence of SEQ ID NO: 65; and/or
(ii) a HC CDR1 amino acid sequence of SEQ ID NO: 57, a HC CDR2 amino acid sequence of SEQ ID NO: 58, or a HC CDR3 amino acid sequence of SEQ ID NO: 59.

[0687] In some embodiments, the anti-TCRβV antibody molecule, e.g., anti-TCRβ V12 antibody molecule comprises:

(i) a light chain variable region (VL) comprising a LC CDR1 amino acid sequence of SEQ ID NO: 63, a LC CDR2 amino acid sequence of SEQ ID NO: 64, or a LC CDR3 amino acid sequence of SEQ ID NO: 65; and/or
(ii) a heavy chain variable region (VH) comprising a HC CDR1 amino acid sequence of SEQ ID NO: 57, a HC CDR2 amino acid sequence of SEQ ID NO: 58, or a HC CDR3 amino acid sequence of SEQ ID NO: 59.

[0688] In some embodiments, the anti-TCRβV antibody molecule, e.g., anti-TCRβ V12 antibody molecule comprises:

(i) a LC CDR1 amino acid sequence of SEQ ID NO: 66, a LC CDR2 amino acid sequence of SEQ ID NO: 67, or a LC CDR3 amino acid sequence of SEQ ID NO: 68; and/or
(ii) a HC CDR1 amino acid sequence of SEQ ID NO: 60, a HC CDR2 amino acid sequence of SEQ ID NO: 61, or a HC CDR3 amino acid sequence of SEQ ID NO: 62.

[0689] In some embodiments, the anti-TCRβV antibody molecule, e.g., anti-TCRβ V12 antibody molecule comprises:

(i) a light chain variable region (VL) comprising a LC CDR1 amino acid sequence of SEQ ID NO: 63, a LC CDR2 amino acid sequence of SEQ ID NO: 64, or a LC CDR3 amino acid sequence of SEQ ID NO: 65; and/or
(ii) a heavy chain variable region (VH) comprising a HC CDR1 amino acid sequence of SEQ ID NO: 57, a HC CDR2 amino acid sequence of SEQ ID NO: 58, or a HC CDR3 amino acid sequence of SEQ ID NO: 59.

[0690] In one embodiment, the light or the heavy chain variable framework (e.g., the region encompassing at least FR1, FR2, FR3, and optionally FR4) of the anti-TCRβV antibody molecule, e.g., anti-TCRβ V12 antibody molecule can be chosen from: (a) a light or heavy chain variable framework including at least 80%, 85%, 87% 90%, 92%, 93%, 95%, 97%, 98%, or 100% of the amino acid residues from a human light or heavy chain variable framework, e.g., a light or heavy chain variable framework residue from a human mature antibody, a human germline sequence, or a human consensus sequence; (b) a light or heavy chain variable framework including from 20% to 80%, 40% to 60%, 60% to 90%, or 70% to 95% of the amino acid residues from a human light or heavy chain variable framework, e.g., a light or heavy chain variable framework residue from a human mature antibody, a human germline sequence, or a human consensus sequence; (c) a non-human framework (e.g., a rodent framework); or (d) a non-human framework that has been modified, e.g., to remove antigenic or cytotoxic determinants, e.g., deimmunized, or partially humanized. In one embodiment, the light or heavy chain variable framework region (particularly FR1, FR2 and/or FR3) includes a light or heavy chain variable framework sequence at least 70, 75, 80, 85, 87, 88, 90, 92, 94, 95, 96, 97, 98, 99% identical or identical to the frameworks of a VL or VH segment of a human germline gene.

[0691] In some embodiments, the anti-TCRβV antibody molecule, e.g., anti-TCRβ V12 antibody molecule, comprises a heavy chain variable domain having at least one, two, three, four, five, six, seven, ten, fifteen, twenty or more changes, e.g., amino acid substitutions or deletions, from an amino acid sequence described in Table 2A. e.g., the amino acid sequence of the FR region in the entire variable region, e.g., shown in FIGS. 2A and 2B, or in SEQ ID NOs: 23-25.

[0692] Alternatively, or in combination with the heavy chain substitutions described herein the anti-TCRβV antibody molecule, e.g., anti-TCRβ V12 antibody molecule comprises a light chain variable domain having at least one, two, three, four, five, six, seven, ten, fifteen, twenty or more amino acid changes, e.g., amino acid substitutions or deletions, from an amino acid sequence of an antibody described herein. e.g., the amino acid sequence of the FR region in the entire variable region, e.g., shown in FIGS. 2A and 2B, or in SEQ ID NOs: 26-30.

[0693] In some embodiments, the anti-TCRβV antibody molecule, e.g., anti-TCRβ V12 antibody molecule includes one, two, three, or four heavy chain framework regions shown in FIG. 2A, or a sequence substantially identical thereto.

[0694] In some embodiments, the anti-TCRβV antibody molecule, e.g., anti-TCRβ V12 antibody molecule includes one, two, three, or four light chain framework regions shown in FIG. 2B, or a sequence substantially identical thereto.

[0695] In some embodiments, the anti-TCRβV antibody molecule, e.g., anti-TCRβ V12 antibody molecule comprises the light chain framework region 1 e.g., as shown in FIG. 2B.

[0696] In some embodiments, the anti-TCRβV antibody molecule, e.g., anti-TCRβ V12 antibody molecule comprises the light chain framework region 2 e.g., as shown in FIG. 2B.

[0697] In some embodiments, the anti-TCRβV antibody molecule, e.g., anti-TCRβ V12 antibody molecule comprises the light chain framework region 3, e.g., as shown in FIG. 2B.

[0698] In some embodiments, the anti-TCRβV antibody molecule, e.g., anti-TCRβ V12 antibody molecule comprises the light chain framework region 4, e.g., as shown in FIG. 2B.

[0699] In some embodiments, the anti-TCRβV antibody molecule, e.g., anti-TCRβ V12 antibody molecule comprises a light chain comprising a framework region, e.g., framework region 1 (FR1), comprising a change, e.g., a substitution (e.g., a conservative substitution) at one or more, e.g., all, position disclosed herein according to Kabat numbering. In some embodiments, FR1 comprises an Aspartic Acid at position 1, e.g., a substitution at position 1 according to Kabat numbering, e.g., an Alanine to Aspartic Acid substitution. In some embodiments, FR1 comprises an Asparagine at position 2, e.g., a substitution at position 2 according to Kabat numbering, e.g., an Isoleucine to Asparagine substitution, Serine to Asparagine substitution or Tyrosine to Asparagine substitution. In some embodiments, FR1 comprises a Leucine at position 4, e.g., a substitution at position 4 according to Kabat numbering, e.g., a Methionine to Leucine substitution.

[0700] In some embodiments, the anti-TCRβV antibody molecule, e.g., anti-TCRβ V12 antibody molecule comprises a light chain comprising a framework region, e.g., framework region 1 (FR1), comprising a substitution at position 1 according to Kabat numbering, e.g., an Alanine to Aspartic Acid substitution, a substitution at position 2 according to Kabat numbering, e.g., an Isoleucine to Asparagine substitution, Serine to Asparagine substitution or Tyrosine to Asparagine substitution, and a substitution at position 4 according to Kabat numbering, e.g., a Methionine to Leucine substitution. In some embodiments, the anti-TCRβV antibody molecule, e.g., anti-TCRβ V12 antibody molecule comprises a light chain comprising a framework region, e.g., framework region 1 (FR1), comprising a substitution at position 1 according to Kabat numbering, e.g., an Alanine to Aspartic Acid substitution, and a substitution at position 2 according to Kabat numbering, e.g., an Isoleucine to Asparagine substitution, Serine to Asparagine substitution or Tyrosine to Asparagine substitution. In some embodiments, the anti-TCRβV antibody molecule, e.g., anti-TCRβ V12 antibody molecule comprises a light chain comprising a framework region, e.g., framework region 1 (FR1), comprising a substitution at position 1 according to Kabat numbering, e.g., an Alanine to Aspartic Acid substitution, and a substitution at position 4 according to Kabat numbering, e.g., a Methionine to Leucine substitution. In some embodiments, the anti-TCRβV antibody molecule, e.g., anti-TCRβ V12 antibody molecule comprises a light chain comprising a framework region, e.g., framework region 1 (FR1), comprising a substitution at position 2 according to Kabat numbering, e.g., an Isoleucine to Asparagine substitution, Serine to Asparagine substitution or Tyrosine to Asparagine substitution, and a substitution at position 4 according to Kabat numbering, e.g., a Methionine to Leucine substitution. In some embodiments, the substitution is relative to a human germline light chain framework region sequence.

[0701] In some embodiments, the anti-TCRβV antibody molecule, e.g., anti-TCRβ V12 antibody molecule comprises a light chain comprising a framework region, e.g., framework region 3 (FR3), comprising a change, e.g., a substitution (e.g., a conservative substitution) at one or more, e.g., all, position disclosed herein according to Kabat numbering. In some embodiments, FR3 comprises a Glycine at position 66, e.g., a substitution at position 66 according to Kabat numbering, e.g., a Lysine to Glycine substitution, or a Serine to Glycine substitution. In some embodiments, FR3 comprises an Asparagine at position 69, e.g., a substitution at position 69 according to Kabat numbering, e.g., a Tyrosine to Asparagine substitution. In some embodiments, FR3 comprises a Tyrosine at position 71, e.g., a substitution at position 71 according to Kabat numbering, e.g., a Phenylalanine to Tyrosine substitution, or an Alanine to Tyrosine substitution.

[0702] In some embodiments, the anti-TCRβV antibody molecule, e.g., anti-TCRβ V12 antibody molecule comprises a light chain comprising a framework region, e.g., framework region 3 (FR3), comprising a substitution at position 66 according to Kabat numbering, e.g., a Lysine to Glycine substitution, or a Serine to Glycine substitution, and a substitution at position 69 according to Kabat numbering, e.g., a Tyrosine to Asparagine substitution. In some embodiments, the anti-TCRβV antibody molecule, e.g., anti-TCRβ V12 antibody molecule comprises a light chain comprising a framework region, e.g., framework region 3 (FR3), comprising a substitution at position 66 according to Kabat numbering, e.g., Lysine to Glycine substitution, or a Serine to Glycine substitution, and a substitution at position 71 according to Kabat numbering, e.g., a Phenylalanine to Tyrosine substitution, or an Alanine to Tyrosine substitution. In some embodiments, the anti-TCRβV antibody molecule, e.g., anti-TCRβ V12 antibody molecule comprises a light chain comprising a framework region, e.g., framework region 3 (FR3), comprising a substitution at position 69 according to Kabat numbering, e.g., a Tyrosine to Asparagine substitution and a substitution at position 71 according to Kabat numbering, e.g., a Phenylalanine to Tyrosine substitution, or an Alanine to Tyrosine substitution. In some embodiments, the anti-TCRβV antibody molecule, e.g., anti-TCRβ V12 antibody molecule comprises a light chain comprising a framework region, e.g., framework region 3 (FR3), comprising a substitution at position 66 according to Kabat numbering, e.g., a Lysine to Glycine substitution, or a Serine to Glycine substitution, a substitution at position 69 according to Kabat numbering, e.g., a Tyrosine to Asparagine substitution and a substitution at position 71 according to Kabat numbering, e.g., a Phenylalanine to Tyrosine substitution, or an Alanine to Tyrosine substitution. In some embodiments, the substitution is relative to a human germline light chain framework region sequence.

[0703] In some embodiments, the anti-TCRβV antibody molecule, e.g., anti-TCRβ V12 antibody molecule comprises a light chain comprising: a framework region 1 (FR1) comprising a substitution at position 2 according to Kabat numbering, e.g., a Isoleucine to Asparagine substitution; and a framework region 3 (FR3), comprising a substitution at position 69 according to Kabat numbering, e.g., a Threonine to Asparagine substitution and a substitution at position 71 according to Kabat numbering, e.g., a Phenylalanine to Tyrosine substitution, e.g., as shown in the amino acid sequence of SEQ ID NO: 26. In some embodiments, the substitution is relative to a human germline light chain framework region sequence.

[0704] In some embodiments, the anti-TCRβV antibody molecule, e.g., anti-TCRβ V12 antibody molecule comprises a light chain comprising: (a) a framework region 1 (FR1) comprising a substitution at position 1 according to Kabat numbering, e.g., a Alanine to Aspartic Acid substitution, and a substitution at position 2 according to Kabat numbering, e.g., a Isoleucine to Asparagine substitution; and (b) a framework region 3 (FR3), comprising a substitution at position 69 according to Kabat numbering, e.g., a Threonine to Asparagine substitution and a substitution at position 71 according to Kabat numbering, e.g., a Phenylalanine to Tyrosine substitution, e.g., as shown in the amino acid sequence of SEQ ID NO: 27. In some embodiments, the substitution is relative to a human germline light chain framework region sequence.

[0705] In some embodiments, the anti-TCRβV antibody molecule, e.g., anti-TCRβ V12 antibody molecule comprises a light chain comprising: (a) a framework region 1 (FR1) comprising a substitution at position 2 according to Kabat numbering, e.g., a Serine to Asparagine substitution; and a substitution at position 4 according to Kabat numbering, e.g., a Methionine to Leucine substitution; and (b) a framework region 3 (FR3), comprising a substitution at position 69 according to Kabat numbering, e.g., a Threonine to Asparagine substitution and a substitution at position 71 according to Kabat numbering, e.g., a Phenylalanine to Tyrosine substitution, e.g., as shown in the amino acid sequence of SEQ ID NO: 28. In some embodiments, the substitution is relative to a human germline light chain framework region sequence.

[0706] In some embodiments, the anti-TCRβV antibody molecule, e.g., anti-TCRβ V12 antibody molecule comprises a light chain comprising: (a) a framework region 1 (FR1) comprising a substitution at position 2 according to Kabat numbering, e.g., a Serine to Asparagine substitution; and (b) a framework region 3 (FR3) comprising a substitution at position 66 according to Kabat numbering, e.g., a Lysine to Glycine substitution; a substitution at position 69 according to Kabat numbering, e.g., a Threonine to Asparagine substitution; and a substitution at position 71 according to Kabat numbering, e.g., a Alanine to Tyrosine substitution, e.g., as shown in the amino acid sequence of SEQ ID NO: 29. In some embodiments, the substitution is relative to a human germline light chain framework region sequence.

[0707] In some embodiments, the anti-TCRβV antibody molecule, e.g., anti-TCRβ V12 antibody molecule comprises a light chain comprising: (a) a framework region 1 (FR1) comprising a substitution at position 2 according to Kabat numbering, e.g., a Tyrosine to Asparagine substitution; and (b) a framework region 3 (FR3) comprising a substitution at position 66 according to Kabat numbering, e.g., a Serine to Glycine substitution; a substitution at position 69 according to Kabat numbering, e.g., a Threonine to Asparagine substitution; and a substitution at position 71 according to Kabat numbering, e.g., a Alanine to Tyrosine substitution, e.g., as shown in the amino acid sequence of SEQ ID NO: 29. In some embodiments, the substitution is relative to a human germline light chain framework region sequence.

[0708] In some embodiments, the anti-TCRβV antibody molecule, e.g., anti-TCRβ V12 antibody molecule comprises a light chain variable domain comprising: (a) a framework region 1 (FR1) comprising a change, e.g., a substitution (e.g., a conservative substitution) at one or more (e.g., all) positions disclosed herein according to Kabat numbering, and (b) a framework region 3 (FR3) comprising a change, e.g., a substitution (e.g., a conservative substitution) at one or more (e.g., all) position disclosed herein according to Kabat numbering. In some embodiments, the substitution is relative to a human germline light chain framework region sequence.

[0709] In some embodiments, the anti-TCRβV antibody molecule, e.g., anti-TCRβ V12 antibody molecule comprises the heavy chain framework region 1, e.g., as shown in FIG. 2A.

[0710] In some embodiments, the anti-TCRβV antibody molecule, e.g., anti-TCRβ V12 antibody molecule comprises the heavy chain framework region 2, e.g., as shown in FIG. 2A.

[0711] In some embodiments, the anti-TCRβV antibody molecule, e.g., anti-TCRβ V12 antibody molecule comprises the heavy chain framework region 3, e.g., as shown in FIG. 2A.

[0712] In some embodiments, the anti-TCRβV antibody molecule, e.g., anti-TCRβ V12 antibody molecule comprises the heavy chain framework region 4, e.g., as shown in FIG. 2A.

[0713] In some embodiments, the anti-TCRβV antibody molecule, e.g., anti-TCRβ V12 antibody molecule comprises the heavy chain framework regions 1-4, e.g., SEQ ID NOS: 20-23, or as shown in FIG. 2A.

[0714] In some embodiments, the anti-TCRβV antibody molecule, e.g., anti-TCRβ V12 antibody molecule comprises the light chain framework regions 1-4, e.g., SEQ ID NOs: 26-30, or as shown in FIG. 2B.

[0715] In some embodiments, the anti-TCRβV antibody molecule, e.g., anti-TCRβ V12 antibody molecule comprises the heavy chain framework regions 1-4, e.g., SEQ ID NOs: 23-25; and the light chain framework regions 1-4, e.g., SEQ ID NOs: 26-30, or as shown in FIGS. 2A and 2B.

[0716] In some embodiments, the heavy or light chain variable domain, or both, of, the anti-TCRβV antibody molecule, e.g., anti-TCRβ V12 antibody molecule includes an amino acid sequence, which is substantially identical to an amino acid disclosed herein, e.g., at least 80%, 85%, 90%, 92%, 95%, 97%, 98%, 99% or higher identical to a variable region of an antibody described herein, e.g., an antibody as described in Table 2A, or encoded by the nucleotide sequence in Table 2A; or which differs at least 1 or 5 residues, but less than 40, 30, 20, or 10 residues, from a variable region of an antibody described herein.

[0717] In some embodiments, the anti-TCRβV antibody molecule, e.g., anti-TCRβ V12 antibody molecule comprises at least one, two, three, or four antigen-binding regions, e.g., variable regions, having an amino acid sequence as set forth in Table 2A, or a sequence substantially identical thereto (e.g., a sequence at least about 85%, 90%, 95%, 99% or more identical thereto, or which differs by no more than 1, 2, 5, 10, or 15 amino acid residues from the sequences shown in Table 2A. In another embodiment, the anti-TCRβV antibody molecule, e.g., anti-TCRβ V12 antibody molecule includes a VH and/or VL domain encoded by a nucleic acid having a nucleotide sequence as set forth in Table 2A, or a sequence substantially identical thereto (e.g., a sequence at least about 85%, 90%, 95%, 99% or more identical thereto, or which differs by no more than 3, 6, 15, 30, or 45 nucleotides from the sequences shown in Table 2A.

[0718] In some embodiments, the anti-TCRβV antibody molecule, e.g., anti-TCRβ V12 antibody molecule comprises:

a VH domain comprising an amino acid sequence chosen from the amino acid sequence of SEQ ID NO: 23, SEQ ID NO: 24 or SEQ ID NO: 25, an amino acid sequence at least about 85%, 90%, 95%, 99% or more identical to the amino acid sequence SEQ ID NO: 23, SEQ ID NO: 24 or SEQ ID NO: 25, or an amino acid sequence which differs by no more than 1, 2, 5, 10, or 15 amino acid residues from the amino acid sequence of SEQ ID NO: 23, SEQ ID NO: 24, or SEQ ID NO: 25; and/or a VL domain comprising an amino acid sequence chosen from the amino acid sequence of SEQ ID NO: 26, SEQ ID NO: 27, SEQ ID NO: 28, SEQ ID NO: 29, or SEQ ID NO: 30, an amino acid sequence at least about 85%, 90%, 95%, 99% or more identical to the amino acid sequence of SEQ ID NO: 26, SEQ ID NO: 27, SEQ ID NO: 28, SEQ ID NO: 29, or SEQ ID NO: 30, or an amino acid sequence which differs by no more than 1, 2, 5, 10, or 15 amino acid residues from the amino acid sequence of SEQ ID NO: 26, SEQ ID NO: 27, SEQ ID NO: 28, SEQ ID NO: 29, or SEQ ID NO: 30.

[0719] In some embodiments, the anti-TCRβV antibody molecule, e.g., anti-TCRβ V12 antibody molecule comprises:

a VH domain comprising the amino acid sequence of SEQ ID NO: 23, an amino acid sequence at least about 85%, 90%, 95%, 99% or more identical to the amino acid sequence SEQ ID NO: 23, or an amino acid sequence which differs by no more than 1, 2, 5, 10, or 15 amino acid residues from the amino acid sequence of SEQ ID NO: 23; and
a VL domain comprising the amino acid sequence of SEQ ID NO: 26, an amino acid sequence at least about 85%, 90%, 95%, 99% or more identical to the amino acid sequence SEQ ID NO: 26, or an amino acid sequence which differs by no more than 1, 2, 5, 10, or 15 amino acid residues from the amino acid sequence of SEQ ID NO: 26.

[0720] In some embodiments, the anti-TCRβV antibody molecule, e.g., anti-TCRβ V12 antibody molecule comprises:

a VH domain comprising the amino acid sequence of SEQ ID NO: 23, an amino acid sequence at least about 85%, 90%, 95%, 99% or more identical to the amino acid sequence SEQ ID NO: 23, or an amino acid sequence which differs by no more than 1, 2, 5, 10, or 15 amino acid residues from the amino acid sequence of SEQ ID NO: 23; and
a VL domain comprising the amino acid sequence of SEQ ID NO: 27, an amino acid sequence at least about 85%, 90%, 95%, 99% or more identical to the amino acid sequence SEQ ID NO: 27, or an amino acid sequence which differs by no more than 1, 2, 5, 10, or 15 amino acid residues from the amino acid sequence of SEQ ID NO: 27.

[0721] In some embodiments, the anti-TCRβV antibody molecule, e.g., anti-TCRβ V12 antibody molecule comprises:

a VH domain comprising the amino acid sequence of SEQ ID NO: 23, an amino acid sequence at least about 85%, 90%, 95%, 99% or more identical to the amino acid sequence SEQ ID NO: 23, or an amino acid sequence which differs by no more than 1, 2, 5, 10, or 15 amino acid residues from the amino acid sequence of SEQ ID NO: 23; and
a VL domain comprising the amino acid sequence of SEQ ID NO: 28, an amino acid sequence at least about 85%, 90%, 95%, 99% or more identical to the amino acid sequence SEQ ID NO: 28, or an amino acid sequence which differs by no more than 1, 2, 5, 10, or 15 amino acid residues from the amino acid sequence of SEQ ID NO: 28.

[0722] In some embodiments, the anti-TCRβV antibody molecule, e.g., anti-TCRβ V12 antibody molecule comprises:

a VH domain comprising the amino acid sequence of SEQ ID NO: 23, an amino acid sequence at least about 85%, 90%, 95%, 99% or more identical to the amino acid sequence SEQ ID NO: 23, or an amino acid sequence which differs by no more than 1, 2, 5, 10, or 15 amino acid residues from the amino acid sequence of SEQ ID NO: 23; and
a VL domain comprising the amino acid sequence of SEQ ID NO: 29, an amino acid sequence at least about 85%, 90%, 95%, 99% or more identical to the amino acid sequence SEQ ID NO: 29, or an amino acid sequence which differs by no more than 1, 2, 5, 10, or 15 amino acid residues from the amino acid sequence of SEQ ID NO: 29.

[0723] In some embodiments, the anti-TCRβV antibody molecule, e.g., anti-TCRβ V12 antibody molecule comprises:

a VH domain comprising the amino acid sequence of SEQ ID NO: 23, an amino acid sequence at least about 85%, 90%, 95%, 99% or more identical to the amino acid sequence SEQ ID NO: 23, or an amino acid sequence which differs by no more than 1, 2, 5, 10, or 15 amino acid residues from the amino acid sequence of SEQ ID NO: 23; and
a VL domain comprising the amino acid sequence of SEQ ID NO: 30, an amino acid sequence at least about 85%, 90%, 95%, 99% or more identical to the amino acid sequence SEQ ID NO: 30, or an amino acid sequence which differs by no more than 1, 2, 5, 10, or 15 amino acid residues from the amino acid sequence of SEQ ID NO: 30.

[0724] In some embodiments, the anti-TCRβV antibody molecule, e.g., anti-TCRβ V12 antibody molecule comprises:

a VH domain comprising the amino acid sequence of SEQ ID NO: 24, an amino acid sequence at least about 85%, 90%, 95%, 99% or more identical to the amino acid sequence SEQ ID NO: 24, or an amino acid sequence which differs by no more than 1, 2, 5, 10, or 15 amino acid residues from the amino acid sequence of SEQ ID NO: 24; and
a VL domain comprising the amino acid sequence of SEQ ID NO: 26, an amino acid sequence at least about 85%, 90%, 95%, 99% or more identical to the amino acid sequence SEQ ID NO: 26, or an amino acid sequence which differs by no more than 1, 2, 5, 10, or 15 amino acid residues from the amino acid sequence of SEQ ID NO: 26.

[0725] In some embodiments, the anti-TCRβV antibody molecule, e.g., anti-TCRβ V12 antibody molecule comprises:

a VH domain comprising the amino acid sequence of SEQ ID NO: 24, an amino acid sequence at least about 85%, 90%, 95%, 99% or more identical to the amino acid sequence SEQ ID NO: 24, or an amino acid sequence which differs by no more than 1, 2, 5, 10, or 15 amino acid residues from the amino acid sequence of SEQ ID NO: 24; and
a VL domain comprising the amino acid sequence of SEQ ID NO: 27, an amino acid sequence at least about 85%, 90%, 95%, 99% or more identical to the amino acid sequence SEQ ID NO: 27, or an amino acid sequence which differs by no more than 1, 2, 5, 10, or 15 amino acid residues from the amino acid sequence of SEQ ID NO: 27.

[0726] In some embodiments, the anti-TCRβV antibody molecule, e.g., anti-TCRβ V12 antibody molecule comprises:

a VH domain comprising the amino acid sequence of SEQ ID NO: 24, an amino acid sequence at least about 85%, 90%, 95%, 99% or more identical to the amino acid sequence SEQ ID NO: 24, or an amino acid sequence which differs by no more than 1, 2, 5, 10, or 15 amino acid residues from the amino acid sequence of SEQ ID NO: 24; and
a VL domain comprising the amino acid sequence of SEQ ID NO: 28, an amino acid sequence at least about 85%, 90%, 95%, 99% or more identical to the amino acid sequence SEQ ID NO: 28, or an amino acid sequence which differs by no more than 1, 2, 5, 10, or 15 amino acid residues from the amino acid sequence of SEQ ID NO: 28.

[0727] In some embodiments, the anti-TCRβV antibody molecule, e.g., anti-TCRβ V12 antibody molecule comprises:

a VH domain comprising the amino acid sequence of SEQ ID NO: 24, an amino acid sequence at least about 85%, 90%, 95%, 99% or more identical to the amino acid sequence SEQ ID NO: 24, or an amino acid sequence which differs by no more than 1, 2, 5, 10, or 15 amino acid residues from the amino acid sequence of SEQ ID NO: 24; and
a VL domain comprising the amino acid sequence of SEQ ID NO: 29, an amino acid sequence at least about 85%, 90%, 95%, 99% or more identical to the amino acid sequence SEQ ID NO: 29, or an amino acid sequence which differs by no more than 1, 2, 5, 10, or 15 amino acid residues from the amino acid sequence of SEQ ID NO: 29.

[0728] In some embodiments, the anti-TCRβV antibody molecule, e.g., anti-TCRβ V12 antibody molecule comprises:

a VH domain comprising the amino acid sequence of SEQ ID NO: 24, an amino acid sequence at least about 85%, 90%, 95%, 99% or more identical to the amino acid sequence SEQ ID NO: 24, or an amino acid sequence which differs by no more than 1, 2, 5, 10, or 15 amino acid residues from the amino acid sequence of SEQ ID NO: 24; and
a VL domain comprising the amino acid sequence of SEQ ID NO: 30, an amino acid sequence at least about 85%, 90%, 95%, 99% or more identical to the amino acid sequence SEQ ID NO: 30, or an amino acid sequence which differs by no more than 1, 2, 5, 10, or 15 amino acid residues from the amino acid sequence of SEQ ID NO: 30.

[0729] In some embodiments, the anti-TCRβV antibody molecule, e.g., anti-TCRβ V12 antibody molecule comprises:

a VH domain comprising the amino acid sequence of SEQ ID NO: 25, an amino acid sequence at least about 85%, 90%, 95%, 99% or more identical to the amino acid sequence SEQ ID NO: 25, or an amino acid sequence which differs by no more than 1, 2, 5, 10, or 15 amino acid residues from the amino acid sequence of SEQ ID NO: 25; and
a VL domain comprising the amino acid sequence of SEQ ID NO: 26, an amino acid sequence at least about 85%, 90%, 95%, 99% or more identical to the amino acid sequence SEQ ID NO: 26, or an amino acid sequence which differs by no more than 1, 2, 5, 10, or 15 amino acid residues from the amino acid sequence of SEQ ID NO: 26.

[0730] In some embodiments, the anti-TCRβV antibody molecule, e.g., anti-TCRβ V12 antibody molecule comprises:

a VH domain comprising the amino acid sequence of SEQ ID NO: 25, an amino acid sequence at least about 85%, 90%, 95%, 99% or more identical to the amino acid sequence SEQ ID NO: 25, or an amino acid sequence which differs by no more than 1, 2, 5, 10, or 15 amino acid residues from the amino acid sequence of SEQ ID NO: 25; and
a VL domain comprising the amino acid sequence of SEQ ID NO: 27, an amino acid sequence at least about 85%, 90%, 95%, 99% or more identical to the amino acid sequence SEQ ID NO: 27, or an amino acid sequence which differs by no more than 1, 2, 5, 10, or 15 amino acid residues from the amino acid sequence of SEQ ID NO: 27.

[0731] In some embodiments, the anti-TCRβV antibody molecule, e.g., anti-TCRβ V12 antibody molecule comprises:

a VH domain comprising the amino acid sequence of SEQ ID NO: 25, an amino acid sequence at least about 85%, 90%, 95%, 99% or more identical to the amino acid sequence SEQ ID NO: 25, or an amino acid sequence which differs by no more than 1, 2, 5, 10, or 15 amino acid residues from the amino acid sequence of SEQ ID NO: 25; and
a VL domain comprising the amino acid sequence of SEQ ID NO: 28, an amino acid sequence at least about 85%, 90%, 95%, 99% or more identical to the amino acid sequence SEQ ID NO: 28, or an amino acid sequence which differs by no more than 1, 2, 5, 10, or 15 amino acid residues from the amino acid sequence of SEQ ID NO: 28.

[0732] In some embodiments, the anti-TCRβV antibody molecule, e.g., anti-TCRβ V12 antibody molecule comprises:

a VH domain comprising the amino acid sequence of SEQ ID NO: 25, an amino acid sequence at least about 85%, 90%, 95%, 99% or more identical to the amino acid sequence SEQ ID NO: 25, or an amino acid sequence which differs by no more than 1, 2, 5, 10, or 15 amino acid residues from the amino acid sequence of SEQ ID NO: 25; and
a VL domain comprising the amino acid sequence of SEQ ID NO: 29, an amino acid sequence at least about 85%, 90%, 95%, 99% or more identical to the amino acid sequence SEQ ID NO: 29, or an amino acid sequence which differs by no more than 1, 2, 5, 10, or 15 amino acid residues from the amino acid sequence of SEQ ID NO: 29.

[0733] In some embodiments, the anti-TCRβV antibody molecule, e.g., anti-TCRβ V12 antibody molecule comprises:

a VH domain comprising the amino acid sequence of SEQ ID NO: 25, an amino acid sequence at least about 85%, 90%, 95%, 99% or more identical to the amino acid sequence SEQ ID NO: 25, or an amino acid sequence which differs by no more than 1, 2, 5, 10, or 15 amino acid residues from the amino acid sequence of SEQ ID NO: 25; and
a VL domain comprising the amino acid sequence of SEQ ID NO: 30, an amino acid sequence at least about 85%, 90%, 95%, 99% or more identical to the amino acid sequence SEQ ID NO: 30, or an amino acid sequence which differs by no more than 1, 2, 5, 10, or 15 amino acid residues from the amino acid sequence of SEQ ID NO: 30.

[0734] In some embodiments, the anti-TCRβV antibody molecule, e.g., anti-TCRβ V12 antibody molecule is a full antibody or fragment thereof (e.g., a Fab, F(ab′)2, Fv, or a single chain Fv fragment (scFv)). In embodiments, the anti-TCRβV antibody molecule, e.g., anti-TCRβ V6 (e.g., anti-TCRβ V6-5*01) antibody molecule is a monoclonal antibody or an antibody with single specificity. In some embodiments, the anti-TCRβV antibody molecule, e.g., anti-TCRβ V12 antibody molecule, can also be a humanized, chimeric, camelid, shark, or an in vitro-generated antibody molecule. In some embodiments, the anti-TCRβV antibody molecule, e.g., anti-TCRβ V12 antibody molecule is a humanized antibody molecule. The heavy and light chains of the anti-TCRβV antibody molecule, e.g., anti-TCRβ V12 antibody molecule can be full-length (e.g., an antibody can include at least one, and preferably two, complete heavy chains, and at least one, and preferably two, complete light chains) or can include an antigen-binding fragment (e.g., a Fab, F(ab′)2, Fv, a single chain Fv fragment, a single domain antibody, a diabody (dAb), a bivalent antibody, or bispecific antibody or fragment thereof, a single domain variant thereof, or a camelid antibody).

[0735] In some embodiments, the anti-TCRβV antibody molecule, e.g., anti-TCRβ V12 antibody molecule is in the form of a multispecific molecule, e.g., a bispecific molecule, e.g., as described herein.

[0736] In some embodiments, the anti-TCRβV antibody molecule, e.g., anti-TCRβ V12 antibody molecule has a heavy chain constant region (Fc) chosen from, e.g., the heavy chain constant regions of IgG1, IgG2, IgG3, IgG4, IgM, IgA1, IgA2, IgD, and IgE. In some embodiments, the Fc region is chosen from the heavy chain constant regions of IgG1, IgG2, IgG3, and IgG4. In some embodiments, the Fc region is chosen from the heavy chain constant region of IgG1 or IgG2 (e.g., human IgG1, or IgG2). In some embodiments, the heavy chain constant region is human IgG1.

[0737] In some embodiments, the anti-TCRβV antibody molecule, e.g., anti-TCRβ V12 antibody molecule has a light chain constant region chosen from, e.g., the light chain constant regions of kappa or lambda, preferably kappa (e.g., human kappa). In one embodiment, the constant region is altered, e.g., mutated, to modify the properties of the anti-TCRβV antibody molecule, e.g., anti-TCRβ V12 antibody molecule (e.g., to increase or decrease one or more of: Fc receptor binding, antibody glycosylation, the number of cysteine residues, effector cell function, or complement function). For example, the constant region is mutated at positions 296 (M to Y), 298 (S to T), 300 (T to E), 477 (H to K) and 478 (N to F) to alter Fc receptor binding (e.g., the mutated positions correspond to positions 132 (M to Y), 134 (S to T), 136 (T to E), 313 (H to K) and 314 (N to F) of SEQ ID NOs: 212 or 214; or positions 135 (M to Y), 137 (S to T), 139 (T to E), 316 (H to K) and 317 (N to F) of SEQ ID NOs: 215, 216, 217, or 218).

[0738] Antibody B-H.1 comprises a first chain comprising the amino acid sequence of SEQ ID NO: 3280 and a second chain comprising the amino acid sequence of SEQ ID NO: 3281.

[0739] Additional exemplary anti-TCRβ V12 antibodies of the disclosure are provided in Table 2A. In some embodiments, the anti-TCRβ V12 is antibody B, e.g., humanized antibody B (antibody B-H), as provided in Table 2A. In some embodiments, the anti-TCRβV antibody comprises one or more (e.g., all three) of a LC CDR1, LC CDR2, and LC CDR3 provided in Table 2A; and/or one or more (e.g., all three) of a HC CDR1, HC CDR2, and HC CDR3 provided in Table 2A, or a sequence with at least 95% identity thereto. In some embodiments, antibody B comprises a variable heavy chain (VH) and/or a variable light chain (VL) provided in Table 2A, or a sequence with at least 95% identity thereto.

TABLE 2A
Amino acid and nucleotide sequences for murine and humanized antibody
molecules which bind to TCRVB 12, e.g., TCRVB 12-3 or TCRVB 12-4. The
antibody molecules include murine mAb Antibody B and humanized mAb
Antibody B-H.1to B-H.6. The amino acid the heavy and light chain CDRs,
and the amino acid and nucleotide sequences of the heavy and light
chain variable regions, and the heavy and light chains are shown.
Antibody B (murine)

| | | |
|---|---|---|
| SEQ ID NO: 17 | HC CDR1 (Combined) | GFTFSNFGMH |
| SEQ ID NO: 18 | HC CDR2 (Combined) | YISSGSSTIYYADTLKG |
| SEQ ID NO: 19 | HC CDR3 (Combined) | RGEGAMDY |
| SEQ ID NO: 57 | HC CDR1 (Kabat) | NFGMH |
| SEQ ID NO: 58 | HC CDR2 (Kabat) | YISSGSSTIYYADTLKG |
| SEQ ID NO: 59 | HC CDR3 (Kabat) | RGEGAMDY |
| SEQ ID NO: 60 | HC CDR1 (Chothia) | GFTFSNF |
| SEQ ID NO: 61 | HC CDR2 (Chothia) | SSGSST |
| SEQ ID NO: 62 | HC CDR3 (Chothia) | RGEGAMDY |
| SEQ ID NO: 15 | VH | DVQLVESGGGLVQPGGSRKLSCAASGFTFSNFGMH |
| | | WVRQAPDKGLEWVAYISSGSSTIYYADTLKGRFTI |
| | | SRDNPKNTLFLQMTSLRSEDTAMYYCARRGEGAMD |
| | | YWGQGTSVTVSS |
| SEQ ID NO: 20 | LC CDR1 (Combined) | RASSSVNYIY |
| SEQ ID NO: 21 | LC CDR2 (Combined) | YTSNLAP |
| SEQ ID NO: 22 | LC CDR3 (Combined) | QQFTSSPFT |
| SEQ ID NO: 63 | LC CDR1 (Kabat) | RASSSVNYIY |
| SEQ ID NO: 64 | LC CDR2 (Kabat) | YTSNLAP |
| SEQ ID NO: 65 | LC CDR3 (Kabat) | QQFTSSPFT |
| SEQ ID NO: 66 | LC CDR1 (Chothia) | RASSSVNYIY |
| SEQ ID NO: 67 | LC CDR2 (Chothia) | YTSNLAP |
| SEQ ID NO: 68 | LC CDR3 (Chothia) | QQFTSSPFT |
| SEQ ID NO: 16 | VL | ENVLTQSPAIMSASLGEKVTMSCRASSSVNYIYWY |
| | | QQKSDASPKLWIYYTSNLAPGVPTRFSGSGSGNSY |
| | | SLTISSMEGEDAATYYCQQFTSSPFTFGSGTKLEI |
| | | K |

Antibody B humanized (B-H)
Antibody B-H.1A HC-1

| | | |
|---|---|---|
| SEQ ID NO: 17 | HC CDR1 (Combined) | GFTFSNFGMH |
| SEQ ID NO: 18 | HC CDR2 (Combined) | YISSGSSTIYYADTLKG |
| SEQ ID NO: 19 | HC CDR3 (Combined) | RGEGAMDY |
| SEQ ID NO: 23 | VH | EVQLVESGGGLVQPGGSLRLSCAASGFTFSNFGMH |
| | | WVRQAPGKGLEWVSYISSGSSTIYYADTLKGRFTI |
| | | SRDNAKNSLYLQMNSLRAEDTAVYYCARRGEGAMD |
| | | YWGQGTTVTVSS |
| SEQ ID NO: 31 | DNA VH | GAGGTGCAGCTGGTTGAATCTGGCGGAGGATTGGT |
| | | TCAGCCTGGCGGCTCTCTGAGACTGTCTTGTGCCG |
| | | CTTCTGGCTTCACCTTCTCCAACTTCGGCATGCAC |
| | | TGGGTCCGACAGGCCCCTGGAAAAGGACTGGAATG |
| | | GGTGTCCTACATCTCCTCCGGCTCCTCCACCATCT |
| | | ACTACGCTGACACCCTGAAGGGCAGATTCACCATC |
| | | TCTCGGGACAACGCCAAGAACTCCCTGTACCTGCA |
| | | GATGAACAGCCTGAGAGCCGAGGACACCGCCGTGT |
| | | ACTACTGTGCTAGAAGAGGCGAGGGCGCCATGGAT |
| | | TATTGGGGCCAGGGAACCACAGTGACCGTGTCTAG |
| | | C |

Antibody B-H.1B HC-2

| | | |
|---|---|---|
| SEQ ID NO: 17 | HC CDR1 (Combined) | GFTFSNFGMH |
| SEQ ID NO: 18 | HC CDR2 (Combined) | YISSGSSTIYYADTLKG |
| SEQ ID NO: 19 | HC CDR3 (Combined) | RGEGAMDY |
| SEQ ID NO: 24 | VH | EVQLVESGGGLVQPGGSLRLSCAASGFTFSNFGMH |
| | | WVRQAPGKGLEWVSYISSGSSTIYYADTLKGRFTI |
| | | SRDNSKNTLYLQMNSLRAEDTAVYYCARRGEGAMD |
| | | YWGQGTTVTVSS |
| SEQ ID NO: 32 | DNA VH | GAGGTGCAGCTGGTTGAATCTGGCGGAGGATTGGT |
| | | TCAGCCTGGCGGCTCTCTGAGACTGTCTTGTGCCG |
| | | CTTCTGGCTTCACCTTCTCCAACTTCGGCATGCAC |
| | | TGGGTCCGACAGGCCCCTGGAAAAGGACTGGAATG |
| | | GGTGTCCTACATCTCCTCCGGCTCCTCCACCATCT |
| | | ACTACGCTGACACCCTGAAGGGCAGATTCACCATC |
| | | AGCCGGGACAACTCCAAGAACACCCTGTACCTGCA |
| | | GATGAACTCCCTGAGAGCCGAGGACACCGCCGTGT |
| | | ACTACTGTGCTAGAAGAGGCGAGGGCGCCATGGAT |
| | | TATTGGGGCCAGGGAACCACAGTGACCGTGTCTAG |
| | | C |

Antibody B-H.1C HC-3

| | | |
|---|---|---|
| SEQ ID NO: 17 | HC CDR1 (Combined) | GFTFSNFGMH |
| SEQ ID NO: 18 | HC CDR2 (Combined) | YISSGSSTIYYADTLKG |
| SEQ ID NO: 19 | HC CDR3 (Combined) | RGEGAMDY |
| SEQ ID NO: 25 | VH | QVQLVESGGGVVQPGRSLRLSCAASGFTFSNFGMH |
| | | WVRQAPGKGLEWVAYISSGSSTIYYADTLKGRFTI |
| | | SRDNSKNTLYLQMNSLRAEDTAVYYCARRGEGAMD |
| | | YWGQGTTVTVSS |
| SEQ ID NO: 33 | DNA VH | CAGGTGCAGCTGGTGGAATCTGGTGGCGGAGTTGT |
| | | GCAGCCTGGCAGATCCCTGAGACTGTCTTGTGCCG |
| | | CCTCTGGCTTCACCTTCTCCAACTTCGGCATGCAC |
| | | TGGGTCCGACAGGCCCCTGGAAAAGGATTGGAGTG |
| | | GGTCGCCTACATCTCCTCCGGCTCCTCCACCATCT |
| | | ACTACGCTGACACCCTGAAGGGCAGATTCACCATC |
| | | AGCCGGGACAACTCCAAGAACACCCTGTACCTGCA |
| | | GATGAACTCCCTGAGAGCCGAGGACACCGCCGTGT |
| | | ACTACTGTGCTAGAAGAGGCGAGGGCGCCATGGAT |
| | | TATTGGGGCCAGGGAACCACAGTGACCGTGTCTAG |
| | | C |

Antibody B-H.1D LC-1

| | | |
|---|---|---|
| SEQ ID NO: 20 | LC CDR1 (Combined) | RASSSVNYIY |
| SEQ ID NO: 21 | LC CDR2 (Combined) | YTSNLAP |
| SEQ ID NO: 22 | LC CDR3(Combined) | QQFTSSPFT |
| SEQ ID NO: 26 | VL | DNQLTQSPSFLSASVGDRVTITCRASSSVNYIYWY |
| | | QQKPGKAPKLLIYYTSNLAPGVPSRFSGSGSGNEY |
| | | TLTISSLQPEDFATYYCQQFTSSPFTFGQGTKLEI |
| | | K |
| SEQ ID NO: 34 | DNA VL | GATAACCAGCTGACCCAGTCTCCTAGCTTCCTGTC |
| | | TGCCTCTGTGGGCGACAGAGTGACAATTACCTGCC |
| | | GGGCCTCCTCCTCCGTGAACTACATCTACTGGTAT |
| | | CAGCAGAAGCCCGGCAAGGCCCCTAAGCTGCTGAT |
| | | CTACTACACCTCCAATCTGGCCCCTGGCGTGCCCT |
| | | CTAGATTTTCCGGATCTGGCTCCGGCAACGAGTAT |
| | | ACCCTGACAATCTCCAGCCTGCAGCCTGAGGACTT |
| | | CGCCACCTACTACTGCCAGCAGTTCACCTCCTCTC |
| | | CATTCACCTTTGGCCAGGGCACCAAGCTGGAAATC |
| | | AAA |

Antibody B-H.1E LC-2

| | | |
|---|---|---|
| SEQ ID NO: 20 | LC CDR1 (Combined) | RASSSVNYIY |
| SEQ ID NO: 21 | LC CDR2 (Combined) | YTSNLAP |
| SEQ ID NO: 22 | LC CDR3(Combined) | QQFTSSPFT |
| SEQ ID NO: 27 | VL | DNQLTQSPSSLSASVGDRVTITCRASSSVNYIYWY |
| | | QQKPGKAPKLLIYYTSNLAPGVPSRFSGSGSGNDY |
| | | TLTISSLQPEDFATYYCQQFTSSPFTFGQGTKLEI |
| | | K |
| SEQ ID NO: 35 | DNA VL | ATAACCAGCTGACCCAGTCTCCTTCCAGCCTGTCT |
| | | GCTTCTGTGGGCGACAGAGTGACAATTACCTGCCG |
| | | GGCCTCCTCCTCCGTGAACTACATCTACTGGTATC |
| | | AGCAGAAGCCCGGCAAGGCCCCTAAGCTGCTGATC |
| | | TACTACACCTCCAATCTGGCCCCTGGCGTGCCCTC |
| | | TAGATTTTCCGGATCTGGCTCCGGCAACGACTATA |
| | | CCCTGACAATCTCCAGCCTGCAGCCTGAGGACTTC |
| | | GCCACCTACTACTGCCAGCAGTTCACCTCCTCTCC |
| | | ATTCACCTTTGGCCAGGGCACCAAGCTGGAAATCA |
| | | AA |

Antibody B-H.1F LC-3

| | | |
|---|---|---|
| SEQ ID NO: 20 | LC CDR1 (Combined) | RASSSVNYIY |
| SEQ ID NO: 21 | LC CDR2 (Combined) | YTSNLAP |
| SEQ ID NO: 22 | LC CDR3(Combined) | QQFTSSPFT |
| SEQ ID NO: 28 | VL | ENVLTQSPATLSVSPGERATLSCRASSSVNYIYWY |
| | | QQKPGQAPRLLIYYTSNLAPGIPARFSGSGSGNEY |
| | | TLTISSLQSEDFAVYYCQQFTSSPFTFGQGTKLEI |
| | | K |
| SEQ ID NO: 36 | DNA VL | GAGAATGTGCTGACCCAGTCTCCTGCCACACTGTC |
| | | TGTTAGCCCTGGCGAGAGAGCTACCCTGAGCTGCA |
| | | GAGCCTCTTCCTCCGTGAACTACATCTACTGGTAT |
| | | CAGCAGAAGCCCGGCCAGGCTCCTAGACTGCTGAT |
| | | CTACTACACCTCCAATCTGGCCCCTGGCATCCCTG |
| | | CCAGATTTTCCGGATCTGGCTCCGGCAACGAGTAT |
| | | ACCCTGACCATCTCCAGCCTGCAGTCCGAGGACTT |
| | | TGCTGTGTACTATTGCCAGCAGTTCACAAGCAGCC |
| | | CTTTCACCTTTGGCCAGGGCACCAAGCTGGAAATC |
| | | AAA |

Antibody B-H.1G LC-4

| | | |
|---|---|---|
| SEQ ID NO: 20 | LC CDR1 (Combined) | RASSSVNYIY |
| SEQ ID NO: 21 | LC CDR2 (Combined) | YTSNLAP |
| SEQ ID NO: 22 | LC CDR3(Combined) | QQFTSSPFT |
| SEQ ID NO: 29 | VL | QNVLTQPPSASGTPGQRVTISCRASSSVNYIYWYQ |
| | | QLPGTAPKLLIYYTSNLAPGVPDRFSGSGSGNSYS |
| | | LAISGLRSEDEADYYCQQFTSSPFTFGTGTKVTVL |
| SEQ ID NO: 37 | DNA VL | CAGAATGTGCTGACCCAACCTCCTTCCGCCTCTGG |
| | | CACACCTGGACAGAGAGTGACAATCTCCTGCCGGG |
| | | CCTCCTCCTCCGTGAACTACATCTACTGGTATCAG |
| | | CAGCTGCCCGGCACCGCTCCTAAACTGCTGATCTA |
| | | CTACACCTCCAATCTGGCCCCTGGCGTGCCCGATA |
| | | GATTTTCCGGATCTGGCTCCGGCAACTCCTACAGC |
| | | CTGGCTATCTCTGGCCTGAGATCTGAGGACGAGGC |
| | | CGACTACTACTGCCAGCAGTTCACCTCCTCTCCAT |
| | | TCACCTTTGGCACCGGCACCAAAGTGACAGTTCTT |

Antibody B-H.1H LC-5

| | | |
|---|---|---|
| SEQ ID NO: 20 | LC CDR1 (Combined) | RASSSVNYIY |
| SEQ ID NO: 21 | LC CDR2 (Combined) | YTSNLAP |
| SEQ ID NO: 22 | LC CDR3(Combined) | QQFTSSPFT |
| SEQ ID NO: 30 | VL | SNELTQPPSVSVSPGQTARITCRASSSVNYIYWYQ |
| | | QKSGQAPVLVIYYTSNLAPGIPERFSGSGSGNMYT |
| | | LTISGAQVEDEADYYCQQFTSSPFTFGTGTKVTVL |
| SEQ ID NO: 38 | DNA VL | TCTAATGAGCTGACCCAGCCTCCTTCCGTGTCCGT |
| | | GTCTCCTGGACAGACCGCCAGAATTACCTGCCGGG |
| | | CCTCCTCCTCCGTGAACTACATCTACTGGTATCAG |
| | | CAGAAGTCCGGCCAGGCTCCTGTGCTCGTGATCTA |
| | | CTACACCTCCAATCTGGCCCCTGGCATCCCTGAGA |
| | | GATTCTCCGGATCTGGCTCCGGCAACATGTACACC |
| | | CTGACCATCTCTGGCGCCCAGGTGGAAGATGAGGC |
| | | CGACTACTACTGCCAGCAGTTCACCTCCTCTCCAT |
| | | TCACCTTTGGCACCGGCACCAAAGTGACAGTTCTT |

Antibody B-H.1

| | | |
|---|---|---|
| SEQ ID NO: 3280 | Chain1: Fc only | METDTLLLWVLLLWVPGSTGDKTHTCPPCPAPELL |
| | | GGPSVFLFPPKPKDTLMISRTPEVTCVVVDVSHED |
| | | PEVKFNWYVDGVEVHNAKTKPREEQYNSTYRVVSV |
| | | LTVLHQDWLNGKEYKCKVSNKALPAPIEKTISKAK |
| | | GQPREPQVYTLPPCREEMTKNQVSLWCLVKGFYPS |
| | | DIAVEWESNGQPENNYKTTPPVLDSDGSFFLYSKL |
| | | TVDKSRWQQGNVFSCSVMHEALHNRFTQKSLSLSP |
| | | GK |
| SEQ ID NO: 3281 | Chain2. humanized B-H | METDTLLLWVLLLWVPGSTGEVQLVESGGGLVQPG |
| | scFv | GSLRLSCAASGFTFSNFGMHWVRQAPGKGLEWVSY |
| | | ISSGSSTIYYADTLKGRFTISRDNSKNTLYLQMNS |
| | | LRAEDTAVYYCARRGEGAMDYWGQGTTVTVSSGGG |
| | | GSGGGGSGGGGSGGGGSDNQLTQSPSFLSASVGDR |
| | | VTITCRASSSVNYIYWYQQKPGKAPKLLIYYTSNL |
| | | APGVPSRFSGSGSGNEYTLTISSLQPEDFATYYCQ |
| | | QFTSSPFTFGQGTKLEIKGGGGSDKTHTCPPCPAP |
| | | ELLGGPSVFLFPPKPKDTLMISRTPEVTCVVVDVS |
| | | HEDPEVKFNWYVDGVEVHNAKTKPREEQYNSTYRV |
| | | VSVLTVLHQDWLNGKEYKCKVSNKALPAPIEKTIS |
| | | KAKGQPREPQVCTLPPSREEMTKNQVSLSCAVKGF |
| | | YPSDIAVEWESNGQPENNYKTTPPVLDSDGSFFLV |
| | | SKLTVDKSRWQQGNVFSCSVMHEALHNHYTQKSLS |
| | | LSPGKGGGGSGGGGSGLNDIFEAQKIEWHEEVQLV |
| SEQ ID NO: 1343 | scFv | ESGGGLVQPGGSLRLSCAASGFTFSNFGMHWVRQA |
| | | PGKGLEWVSYISSGSSTIYYADTLKGRFTISRDNS |
| | | KNTLYLQMNSLRAEDTAVYYCARRGEGAMDYWGQG |
| | | TTVTVSSGGGGSGGGGSGGGGSGGGGSDNQLTQSP |
| | | SFLSASVGDRVTITCRASSSVNYIYWYQQKPGKAP |
| | | KLLIYYTSNLAPGVPSRFSGSGSGNEYTLTISSLQ |
| | | PEDFATYYCQQFTSSPFTFGQGTKLEIK |

Antibody B-H.2

| | | |
|---|---|---|
| SEQ ID NO: 1338 | scFv | EVQLVESGGGLVQPGGSLRLSCAASGFTFSNFGMH |
| | | WVRQAPGKGLEWVSYISSGSSTIYYADTLKGRFTI |
| | | SRDNSKNTLYLQMNSLRAEDTAVYYCARRGEGAMD |
| | | YWGQGTTVTVSSGGGGSGGGGSGGGGSGGGGSDNQ |
| | | LTQSPSSLSASVGDRVTITCRASSSVNYIYWYQQK |
| | | PGKAPKLLIYYTSNLAPGVPSRFSGSGSGNDYTLT |
| | | ISSLQPEDFATYYCQQFTSSPFTFGQGTKLEIK |

Antibody B-H.3

| | | |
|---|---|---|
| SEQ ID NO: 1339 | scFv | EVQLVESGGGLVQPGGSLRLSCAASGFTFSNFGMH |
| | | WVRQAPGKGLEWVSYISSGSSTIYYADTLKGRFTI |
| | | SRDNSKNTLYLQMNSLRAEDTAVYYCARRGEGAMD |
| | | YWGQGTTVTVSSGGGGSGGGGSGGGGSGGGGSSNE |
| | | LTQPPSVSVSPGQTARITCRASSSVNYIYWYQQKS |
| | | GQAPVLVIYYTSNLAPGIPERFSGSGSGNMYTLTI |
| | | SGAQVEDEADYYCQQFTSSPFTFGTGTKVTVL |

Antibody B-H.4

| | | |
|---|---|---|
| SEQ ID NO: 1340 | scFv | QVQLVESGGGVVQPGRSLRLSCAASGFTFSNFGMH |
| | | WVRQAPGKGLEWVAYISSGSSTIYYADTLKGRFTI |
| | | SRDNSKNTLYLQMNSLRAEDTAVYYCARRGEGAMD |
| | | YWGQGTTVTVSSGGGGSGGGGSGGGGSGGGGSDNQ |
| | | LTQSPSFLSASVGDRVTITCRASSSVNYIYWYQQK |
| | | PGKAPKLLIYYTSNLAPGVPSRFSGSGSGNEYTLT |
| | | ISSLQPEDFATYYCQQFTSSPFTFGQGTKLEIK |

Antibody B-H.5

| | | |
|---|---|---|
| SEQ ID NO: 1341 | scFv | QVQLVESGGGVVQPGRSLRLSCAASGFTFSNFGMH |
| | | WVRQAPGKGLEWVAYISSGSSTIYYADTLKGRFTI |
| | | SRDNSKNTLYLQMNSLRAEDTAVYYCARRGEGAMD |
| | | YWGQGTTVTVSSGGGGSGGGGSGGGGSGGGGSDNQ |
| | | LTQSPSSLSASVGDRVTITCRASSSVNYIYWYQQK |
| | | PGKAPKLLIYYTSNLAPGVPSRFSGSGSGNDYTLT |
| | | ISSLQPEDFATYYCQQFTSSPFTFGQGTKLEIK |

Antibody B-H.6

| | | |
|---|---|---|
| SEQ ID NO: 1342 | scFv | QVQLVESGGGVVQPGRSLRLSCAASGFTFSNFGMH |
| | | WVRQAPGKGLEWVAYISSGSSTIYYADTLKGRFTI |
| | | SRDNSKNTLYLQMNSLRAEDTAVYYCARRGEGAMD |
| | | YWGQGTTVTVSSGGGGSGGGGSGGGGSGGGGSSNE |
| | | LTQPPSVSVSPGQTARITCRASSSVNYIYWYQQKS |
| | | GQAPVLVIYYTSNLAPGIPERFSGSGSGNMYTLTI |
| | | SGAQVEDEADYYCQQFTSSPFTFGTGTKVTVL |

TABLE 3A
Constant region amino acid sequences of human IgG
heavy chains and human kappa light chain

| | | |
|---|---|---|
| Human kappa | LC | RTVAAPSVFIFPPSDEQLKSGTASVVCLLNNFYPREAKVQWKVDNALQSG |
| constant region | | NSQESVTEQDSKDSTYSLSSTLTLSKADYEKHKVYACEVTHQGLSSPVTK |
| SEQ ID NO: 39 | | SFNRGEC |
| IgG4 (S228P) | HC | ASTKGPSVFPLAPCSRSTSESTAALGCLVKDYFPEPVTVSWNSGALTSGV |
| mutant constant | | HTFPAVLQSSGLYSLSSVVTVPSSSLGTKTYTCNVDHKPSNTKVDKRVES |
| region (EU | | KYGPPCPPCPAPEFLGGPSVFLFPPKPKDTLMISRTPEVTCVVVDVSQED |
| Numbering) | | PEVQFNWYVDGVEVHNAKTKPREEQFNSTYRVVSVLTVLHQDWLNGKEYK |
| SEQ ID NO: 40 | | CKVSNKGLPSSIEKTISKAKGQPREPQVYTLPPSQEEMTKNQVSLTCLVK |
| | | GFYPSDIAVEWESNGQPENNYKTTPPVLDSDGSFFLYSRLTVDKSRWQEG |
| | | NVFSCSVMHEALHNHYTQKSLSLSLG |
| IgG1 wild type | HC | ASTKGPSVFPLAPSSKSTSGGTAALGCLVKDYFPEPVTVSWNSGALTSGV |
| SEQ ID NO: 41 | | HTFPAVLQSSGLYSLSSVVTVPSSSLGTQTYICNVNHKPSNTKVDKRVEP |
| | | KSCDKTHTCPPCPAPELLGGPSVFLFPPKPKDTLMISRTPEVTCVVVDVS |
| | | HEDPEVKFNWYVDGVEVHNAKTKPREEQYNSTYRVVSVLTVLHQDWLNGK |
| | | EYKCKVSNKALPAPIEKTISKAKGQPREPQVYTLPPSREEMTKNQVSLTC |
| | | LVKGFYPSDIAVEWESNGQPENNYKTTPPVLDSDGSFFLYSKLTVDKSRW |
| | | QQGNVFSCSVMHEALHNHYTQKSLSLSPGK |
| IgG1 (N297A) | HC | ASTKGPSVFPLAPSSKSTSGGTAALGCLVKDYFPEPVTVSWNSGALTSGV |
| mutant constant | | HTFPAVLQSSGLYSLSSVVTVPSSSLGTQTYICNVNHKPSNTKVDKRVEP |
| region (EU | | KSCDKTHTCPPCPAPELLGGPSVFLFPPKPKDTLMISRTPEVTCVVVDVS |
| Numbering) | | HEDPEVKFNWYVDGVEVHNAKTKPREEQYASTYRVVSVLTVLHQDWLNGK |
| SEQ ID NO: 42 | | EYKCKVSNKALPAPIEKTISKAKGQPREPQVYTLPPSREEMTKNQVSLTC |
| | | LVKGFYPSDIAVEWESNGQPENNYKTTPPVLDSDGSFFLYSKLTVDKSRW |
| | | QQGNVFSCSVMHEALHNHYTQKSLSLSPGK |
| IgM constant | HC | GSASAPTLFPLVSCENSPSDTSSVAVGCLAQDFLPDSITFSWKYKNNSDI |
| delta CDC | | SSTRGFPSVLRGGKYAATSQVLLPSKDVMQGTDEHVVCKVQHPNGNKEKN |
| (P311A, P313S) | | VPLPVIAELPPKVSVFVPPRDGFFGNPRKSKLICQATGFSPRQIQVSWLR |
| SEQ ID NO: 73 | | EGKQVGSGVTTDQVQAEAKESGPTTYKVTSTLTIKESDWLGQSMFTCRVD |
| | | HRGLTFQQNASSMCVPDQDTAIRVFAIPPSFASIFLTKSTKLTCLVTDLT |
| | | TYDSVTISWTRQNGEAVKTHTNISESHPNATFSAVGEASICEDDWNSGER |
| | | FTCTVTHTDLASSLKQTISRPKGVALHRPDVYLLPPAREQLNLRESATIT |
| | | CLVTGFSPADVFVQWMQRGQPLSPEKYVTSAPMPEPQAPGRYFAHSILTV |
| | | SEEEWNTGETYTCVVAHEALPNRVTERTVDKSTGKPTLYNVSLVMSDTAG |
| | | TCY |
| IgGA1 | HC | ASPTSPKVFPLSLCSTQPDGNVVIACLVQGFFPQEPLSVTWSESGQGVTA |
| SEQ ID NO: 74 | | RNFPPSQDASGDLYTTSSQLTLPATQCLAGKSVTCHVKHYTNPSQDVTVP |
| | | CPVPSTPPTPSPSTPPTPSPSCCHPRLSLHRPALEDLLLGSEANLTCTLT |
| | | GLRDASGVTFTWTPSSGKSAVQGPPERDLCGCYSVSSVLPGCAEPWNHGK |
| | | TFTCTAAYPESKTPLTATLSKSGNTFRPEVHLLPPPSEELALNELVTLTC |
| | | LARGFSPKDVLVRWLQGSQELPREKYLTWASRQEPSQGTTTFAVTSILRV |
| | | AAEDWKKGDTFSCMVGHEALPLAFTQKTIDRLAGKPTHVNVSVVMAEVDG |
| | | TCY |
| IgGA2 | HC | ASPTSPKVFPLSLDSTPQDGNVVVACLVQGFFPQEPLSVTWSESGQNVTA |
| SEQ ID NO: 75 | | RNFPPSQDASGDLYTTSSQLTLPATQCPDGKSVTCHVKHYTNSSQDVTVP |
| | | CRVPPPPPCCHPRLSLHRPALEDLLLGSEANLTCTLTGLRDASGATFTWT |
| | | PSSGKSAVQGPPERDLCGCYSVSSVLPGCAQPWNHGETFTCTAAHPELKT |
| | | PLTANITKSGNTFRPEVHLLPPPSEELALNELVTLTCLARGFSPKDVLVR |
| | | WLQGSQELPREKYLTWASRQEPSQGTTTYAVTSILRVAAEDWKKGETFSC |
| | | MVGHEALPLAFTQKTIDRMAGKPTHINVSVVMAEADGTCY |
| Human Ig_J | HC | MKNHLLFWGVLAVFIKAVHVKAQEDERIVLVDNKCKCARITSRIIRSSED |
| chain | | PNEDIVERNIRIIVPLNNRENISDPTSPLRTRFVYHLSDLCKKCDPTEVE |
| SEQ ID NO: 76 | | LDNQIVTATQSNICDEDSATETCYTYDRNKCYTAVVPLVYGGETKMVETA |
| | | LTPDACYPD |

### Anti-TCRβ V5 Antibodies

[0740] Accordingly, in one aspect, the disclosure provides an anti-TCRβV antibody molecule that binds to human TCRβ V5. In some embodiments, the TCRβ V5 subfamily comprises TCRβ V5-5*01, TCRβ V5-6*01, TCRβ V5-4*01, TCRβ V5-8*01, TCRβ V5-1*01, or a variant thereof.

[0741] Exemplary anti-TCRβ V5 antibodies of the disclosure are provided in Table 10A. In some embodiments, the anti-TCRβ V5 is antibody C, e.g., humanized antibody C (antibody C-H), as provided in Table 10A. In some embodiments, the anti-TCRβV antibody comprises one or more (e.g., all three) of a LC CDR1, LC CDR2, and LC CDR3 provided in Table 10A; and/or one or more (e.g., all three) of a HC CDR1, HC CDR2, and HC CDR3 provided in Table 10A, or a sequence with at least 95% identity thereto. In some embodiments, antibody C comprises a variable heavy chain (VH) and/or a variable light chain (VL) provided in Table 10A, or a sequence with at least 95% identity thereto.

TABLE 10A
Amino acid sequences for anti TCRβ V5 antibodies
Amino acid and nucleotide sequences for murine and humanized antibody
molecules which bind to TCRVB 5 (e.g., TCRVBN 5-5 or TCRVB 5-6).
The amino acid the heavy and light chain CRDs, and the amino acid
and nucleotide sequences of the heavy and light chain
varibable regions, and the heavy and light chains are shown.
Murine antibody C

| | | |
|---|---|---|
| SEQ ID NO: 1315 | HC CDR1 (Kabat) | AYGVN |
| SEQ ID NO: 1316 | HC CDR2 (Kabat) | MIWGDGNTDYNSALKS |
| SEQ ID NO: 1317 | HC CDR3 (Kabat) | DRVTATLYAMDY |
| SEQ ID NO: 1318 | HC CDR1 (Chothia) | GFSLTAY |
| SEQ ID NO: 1319 | HC CDR2 (Chothia) | WGDGN |
| SEQ ID NO: 1317 | HC CDR3 (Chothia) | DRVTATLYAMDY |
| SEQ ID NO: 1320 | HC CDR1 (Combined) | GFSLTAYGVN |
| SEQ ID NO: 1316 | HC CDR2 (Combined) | MIWGDGNTDYNSALKS |
| SEQ ID NO: 1317 | HC CDR3 (Combined) | DRVTATLYAMDY |
| SEQ ID NO: 1321 | LC CDR1 (Kabat) | SASQGISNYLN |
| SEQ ID NO: 1322 | LC CDR2 (Kabat) | YTSSLHS |
| SEQ ID NO: 1323 | LC CDR3 (Kabat) | QQYSKLPRT |
| SEQ ID NO: 1321 | LC CDR1 (Chothia) | SASQGISNYLN |
| SEQ ID NO: 1322 | LC CDR2 (Chothia) | YTSSLHS |
| SEQ ID NO: 1323 | LC CDR3 (Chothia) | QQYSKLPRT |
| SEQ ID NO: 1321 | LC CDR1 (Combined) | SASQGISNYLN |
| SEQ ID NO: 1322 | LC CDR2 (Combined) | YTSSLHS |
| SEQ ID NO: 1323 | LC CDR3 (Combined) | QQYSKLPRT |
| SEQ ID NO: 232 | VH | DIQMTQTTSSLSASLGDRVTISCSASQGISNYLNWYQQ |
| | | KPDGTVKLLIYYTSSLHSGVPSRFSGSGSGTDYSLTIS |
| | | NLEPEDIATYYCQQYSKLPRTFGGGTKVEIK |
| SEQ ID NO: 233 | VL | QVQLKESGPGLVAPSQSLSITCTVSGFSLTAYGVNWVR |
| | | QPPGKGLEWLGMIWGDGNTDYNSALKSRLSISKDNSKS |
| | | QVFLKMNSLQTDDTARYYCARDRVTATLYAMDYWGQGT |
| | | SVTVSS |

Humkanized antibody C
C-H-1 antibody

| | | |
|---|---|---|
| SEQ ID NO: 1315 | HC CDR1 (Kabat) | AYGVN |
| SEQ ID NO: 1316 | HC CDR2 (Kabat) | MIWGDGNTDYNSALKS |
| SEQ ID NO: 1317 | HC CDR3 (Kabat) | DRVTATLYAMDY |
| SEQ ID NO: 1318 | HC CDR1 (Chothia) | GFSLTAY |
| SEQ ID NO: 1319 | HC CDR2 (Chothia) | WGDGN |
| SEQ ID NO: 1317 | HC CDR3 (Chothia) | DRVTATLYAMDY |
| SEQ ID NO: 1320 | HC CDR1 (Combined) | GFSLTAYGVN |
| SEQ ID NO: 1316 | HC CDR2 (Combined) | MIWGDGNTDYNSLAKS |
| SEQ ID NO: 1317 | HC CDR3 (Combined) | DRVTATLYAMDY |
| SEQ ID NO: 1321 | LC CDR1 (Kabat) | SASQGISNYLN |
| SEQ ID NO: 1322 | LC CDR2 (Kabat) | YTSSLHS |
| SEQ ID NO: 1323 | LC CDR3 (Kabat) | QQYSKLPRT |
| SEQ ID NO: 1321 | LC CDR1 (Chothia) | SASQGISNYLN |
| SEQ ID NO: 1322 | LC CDR2 (Chothia) | YTSSLHS |
| SEQ ID NO: 1323 | LC CDR3 (Chothia) | QQYSKLPRT |
| SEQ ID NO: 1321 | LC CDR1 (Combined) | SASQGSINYLN |
| SEQ ID NO: 1322 | LC CDR2 (Combined) | YTSSLHS |
| SEQ ID NO: 1323 | LC CDR3 (Combined) | QQYSKLPRT |
| SEQ ID NO: 1324 | VL | DIQMTQSPSSLSASVGDRVTITCSASQGISNYLNWYQQ |
| | | TPGKAPKLLIYYTSSLHSGVPSRFSGSGSGTDYTFTIS |
| | | SLQPEDIATYYCQQYSKLPRTFGQGTKLQIT |
| SEQ ID NO: 1325 | VH | QVQLQESGPGLVRPSQTLSLTCTVSGFSLTAYGVNWVR |
| | | QPPGRGLEWLGMIWGDGNTDYNSALKSRVTMLKDTSKN |
| | | QFSLRLSSVTAADTAVYYCARDRVTATLYAMDYW |
| | | GQGSLVTVSS |

Humanized antibody C Variable light chain (VL)

| | | | |
|---|---|---|---|
| SEQ ID NO: 3000 | VL | C-H-VL.1 | DIQMTQSPSFLSASVGDRVTITCSASQGISNYLNWYQQ |
| | | | KPGKAVKLLIYYTSSLHSGVPSRFSGSGSGTEYTLTIS |
| | | | SLQPEDFATYYCQQYSKLPRTFGGGTKVEIK |
| SEQ ID NO: 3001 | VL | C-H-VL.2 | DIQMTQSPSSLSASVGDRVTITCSASQGISNYLNWYQQ |
| | | | KPGKAVKLLIYYTSSLHSGVPSRFSGSGSGTDYTLTIS |
| | | | SLQPEDFATYYCQQYSKLPRTFGGGTKVEIK |
| SEQ ID NO: 3002 | VL | C-H-VL.3 | DIQMTQSPSSLSASVGDRVTITCSASQGISNYLNWYQQ |
| | | | KPGKVVKLLIYYTSSLHSGVPSRFSGSGSGTDYTLTIS |
| | | | SLQPEDVATYYCQQYSKLPRTFGGGTKVEIK |
| SEQ ID NO: 3003 | VL | C-H-VL.4 | DIQMTQSPSSLSASVGDRVTITCSASQGISNYLNWYQQ |
| | | | KPGQAVKLLIYYTSSLHSGVPSRFSGSGSGTDYTLTIS |
| | | | SLQPEDVATYYCQQYSKLPRTFGGGTKVEIK |
| SEQ ID NO: 3004 | VL | C-H-VL.5 | DIQMTQSPSSLSASVGDRVTITCSASQGISNYLNWYQQ |
| | | | KPGKAVKLLIYYTSSLHSGVPSRFSGSGSGTDYTFTIS |
| | | | SLQPEDIATYYCQQYSKLPRTFGGGTKVEIK |
| SEQ ID NO: 3005 | VL | C-H-VL.6 | DIQMTQSPSSLSASVGDRVTITCSASQGISNYLNWYQQ |
| | | | KPGKTVKLLIYYTSSLHSGIPSRFSGSGSGTDYTLTIR |
| | | | SLQPEDFATYYCQQYSKLPRTFGGGTKVEIK |
| SEQ ID NO: 3006 | VL | C-H-VL.7 | AIQMTQSPSSLSASVGDRVTITCSASQGISNYLNWYQQ |
| | | | KPGKAVKLLIYYTSSLHSGVPSRFSGSGSGTDYTLTIS |
| | | | SLQPEDFATYYCQQYSKLPRTFGGGTKVEIK |
| SEQ ID NO: 3007 | VL | C-H-VL.8 | DIQMTQSPSSVSASVGDRVTITCSASQGISNYLNWYQQ |
| | | | KPGKAVKLLIYYTSSLHSGVPSRFSGSGSGTDYTLTIS |
| | | | SLQPEDFATYYCQQYSKLPRTFGGGTKVEIK |
| SEQ ID NO: 3008 | VL | C-H-VL.9 | DIQMTQSPSSLSASVGDRVTITCSASQGISNYLNWYQQ |
| | | | KPGKAVKRLIYYTSSLHSGVPSRFSGSGSGTEYTLTIS |
| | | | NLQPEDFATYYCQQYSKLPRTFGGGTKVEIK |
| SEQ ID NO: 3009 | VL | C-H-VL.10 | AIRMTQSPFSLSASVGDRVTITCSASQGISNYLNWYQQ |
| | | | KPAKAVKLFIYYTSSLHSGVPSRFSGSGSGTDYTLTIS |
| | | | SLQPEDFATYYCQQYSKLPRTFGGGTKVEIK |
| SEQ ID NO: 3010 | VL | C-H-VL.11 | DIQMTQSPSSLSASVGDRVTITCSASQGISNYLNWYQQ |
| | | | KPGKAVKRLIYYTSSLHSGVPSRFSGSGSGTEYTLTIS |
| | | | SLQPEDFATYYCQQYSKLPRTFGGGTKVEIK |
| SEQ ID NO: 3011 | VL | C-H-VL.12 | DIQMTQSPSTLSASVGDRVTITCSASQGISNYLNWYQQ |
| | | | KPGKAVKLLIYYTSSLHSGVPSRFSGSGSGTEYTLTIS |
| | | | SLQPDDFATYYCQQYSKLPRTFGGGTKVEIK |
| SEQ ID NO: 3012 | VL | C-H-VL.13 | DIQMTQSPSSLSASVGDRVTITCSASQGISNYLNWYQQ |
| | | | KPGKAVKSLIYYTSSLHSGVPSRFSGSGSGTDYTLTIS |
| | | | SLQPEDFATYYCQQYSKLPRTFGGGTKVEIK |
| SEQ ID NO: 3013 | VL | C-H-VL.14 | DIQMTQSPSSLSASVGDRVTITCSASQGISNYLNWYQQ |
| | | | KPGKAVKSLIYYTSSLHSGVPSKFSGSGSGTDYTLTIS |
| | | | SLQPEDFATYYCQQYSKLPRTFGGGTKVEIK |
| SEQ ID NO: 3014 | VL | C-H-VL.15 | DIQMTQSPSSLSASVGDRVTITCSASQGISNYLNWYQQ |
| | | | KPEKAVKSLIYYTSSLHSGVPSRFSGSGSGTDYTLTIS |
| | | | SLQPEDFATYYCQQYSKLPRTFGGGTKVEIK |
| SEQ ID NO: 3015 | VL | C-H-VL.16 | DIQMTQSPSAMSASVGDRVTITCSASQGISNYLNWYQQ |
| | | | KPGKVVKRLIYYTSSLHSGVPSRFSGSGSGTEYTLTIS |
| | | | SLQPEDFATYYCQQYSKLPRTFGGGTKVEIK |
| SEQ ID NO: 3016 | VL | C-H-VL.17 | DIVMTQSPDSLAVSLGERATINCSASQGISNYLNWYQQ |
| | | | KPGQPVKLLIYYTSSLHSGVPDRFSGSGSGTDYTLTIS |
| | | | SLQAEDVAVYYCQQYSKLPRTFGGGTKVEIK |
| SEQ ID NO: 3017 | VL | C-H-VL.18 | EIVMTQSPGTLSLSPGERATLSCSASQGISNYLNWYQQ |
| | | | KPGQAVKLLIYYTSSLHSGIPDRFSGSGSGTDYTLTIS |
| | | | RLEPEDFAVYYCQQYSKLPRTFGGGTKVEIK |
| SEQ ID NO: 3018 | VL | C-H-VL.19 | EIVMTQSPPTLSLSPGERVTLSCSASQGISNYLNWYQQ |
| | | | KPGQAVKLLIYYTSSLHSGIPARFSGSGSGTDYTLTIS |
| | | | SLQPEDFAVYYCQQYSKLPRTFGGGTKVEIK |
| SEQ ID NO: 3019 | VL | C-H-VL.20 | EIVMTQSPPTLSLSPGERVTLSCSASQGISNYLNWYQQ |
| | | | KPGQAVKLLIYYTSSLHSSIPARFSGSGSGTDYTLTIS |
| | | | SLQPEDFAVYYCQQYSKLPRTFGGGTKVEIK |
| SEQ ID NO: 3020 | VL | C-H-VL.21 | EIVMTQSPATLSLSPGERATLSCSASQGISNYLNWYQQ |
| | | | KPGQAVKLLIYYTSSLHSGIPARFSGSGSGTDYTLTIS |
| | | | SLEPEDFAVYYCQQYSKLPRTFGGGTKVEIK |
| SEQ ID NO: 3021 | VL | C-H-VL.22 | EIVMTQSPATLSLSPGERATLSCSASQGISNYLNWYQQ |
| | | | KPGQAVKLLIYYTSSLHSGIPARFSGSGSGTDYTLTIS |
| | | | RLEPEDFAVYYCQQYSKLPRTFGGGTKVEIK |
| SEQ ID NO: 3022 | VL | C-H-VL.23 | EIVMTQSPATLSLSPGERATLSCSASQGISNYLNWYQQ |
| | | | KPGQAVKLLIYYTSSLHSGIPDRFSGSGSGTDYTLTIS |
| | | | RLEPEDFAVYYCQQYSKLPRTFGGGTKVEIK |
| SEQ ID NO: 3023 | VL | C-H-VL.24 | EIVMTQSPATLSLSPGERATLSCSASQGISNYLNWYQQ |
| | | | KPGLAVKLLIYYTSSLHSGIPDRFSGSGSGTDYTLTIS |
| | | | RLEPEDFAVYYCQQYSKLPRTFGGGTKVEIK |
| SEQ ID NO: 3024 | VL | C-H-VL.25 | DIQMIQSPSFLSASVGDRVSIICSASQGISNYLNWYLQ |
| | | | KPGKSVKLFIYYTSSLHSGVSSRFSGRGSGTDYTLTII |
| | | | SLKPEDFAAYYCQQYSKLPRTFGGGTKVEIK |
| SEQ ID NO: 3025 | VL | C-H-VL.26 | EIVMTQSPATLSLSPGERATLSCSASQGISNYLNWYQQ |
| | | | KPGQAVKLLIYYTSSLHSGIPARFSGSGSGTDYTLTIS |
| | | | SLQPEDFAVYYCQQYSKLPRTFGGGTKVEIK |
| SEQ ID NO: 3026 | VL | C-H-VL.27 | EIVMTQSPATLSLSPGERATLSCSASQGISNYLNWYQQ |
| | | | KPGQAVKLLIYYTSSLHSGIPARFSGSGPGTDYTLTIS |
| | | | SLEPEDFAVYYCQQYSKLPRTFGGGTKVEIK |
| SEQ ID NO: 3027 | VL | C-H-VL.28 | DIVMTQTPLSLSVTPGQPASISCSASQGISNYLNWYLQ |
| | | | KPGQSVKLLIYYTSSLHSGVPDRFSGSGSGTDYTLKIS |
| | | | RVEAEDVGVYYCQQYSKLPRTFGGGTKVEIK |
| SEQ ID NO: 3028 | VL | C-H-VL.29 | DIVMTQTPLSLSVTPGQPASISCSASQGISNYLNWYLQ |
| | | | KPGQPVKLLIYYTSSLHSGVPDRFSGSGSGTDYTLKIS |
| | | | RVEAEDVGVYYCQQYSKLPRTFGGGTKVEIK |
| SEQ ID NO: 3029 | VL | C-H-VL.30 | DIVMTQSPAFLSVTPGEKVTITCSASQGISNYLNWYQQ |
| | | | KPDQAVKLLIYYTSSLHSGVPSRFSGSGSGTDYTFTIS |
| | | | SLEAEDAATYYCQQYSKLPRTFGGGTKVEIK |
| SEQ ID NO: 3030 | VL | C-H-VL.31 | DIVMTQSPLSLPVTPGEPASISCSASQGISNYLNWYLQ |
| | | | KPGQSVKLLIYYTSSLHSGVPDRFSGSGSGTDYTLKIS |
| | | | RVEAEDVGVYYCQQYSKLPRTFGGGTKVEIK |
| SEQ ID NO: 3031 | VL | C-H-VL.32 | DIVMTQTPLSLPVTPGEPASISCSASQGISNYLNWYLQ |
| | | | KPGQSVKLLIYYTSSLHSGVPDRFSGSGSGTDYTLKIS |
| | | | RVEAEDVGVYYCQQYSKLPRTFGGGTKVEIK |
| SEQ ID NO: 3032 | VL | C-H-VL.33 | EIVMTQSPATLSVSPGERATLSCSASQGISNYLNWYQQ |
| | | | KPGQAVKLLIYYTSSLHSGIPARFSGSGSGTEYTLTIS |
| | | | ILQSEDFAVYYCQQYSKLPRTFGGGTKVEIK |
| SEQ ID NO: 3033 | VL | C-H-VL.34 | EIVMTQSPATLSVSPGERATLSCSASQGISNYLNWYQQ |
| | | | KPGQAVKLLIYYTSSLHSGIPARFSGSGSGTEYTLTIS |
| | | | SLQSEDFAVYYCQQYSKLPRTFGGGTKVEIK |
| SEQ ID NO: 3034 | VL | C-H-VL.35 | DIVMTQSPLSLPVTLGQPASISCSASQGISNYLNWYQQ |
| | | | RPGQSVKRLIYYTSSLHSGVPDRFSGSGSGTDYTLKIS |
| | | | RVEAEDVGVYYCQQYSKLPRTFGGGTKVEIK |
| SEQ ID NO: 3035 | VL | C-H-VL.36 | EITMTQSPAFMSATPGDKVNISCSASQGISNYLNWYQQ |
| | | | KPGEAVKFIIYYTSSLHSGIPPRFSGSGYGTDYTLTTN |
| | | | NIESEDAAYYYCQQYSKLPRTFGGGTKVEIK |
| SEQ ID NO: 3036 | VL | C-H-VL.37 | DIVMTQTPLSSPVTLGQPASISCSASQGISNYLNWYQQ |
| | | | RPGQPVKLLIYYTSSLHSGVPDRFSGSGAGTDYTLKIS |
| | | | RVEAEDVGVYYCQQYSKLPRTFGGGTKVEIK |
| SEQ ID NO: 3037 | VL | C-H-VL.38 | EIVMTQSPDFQSVTPKEKVTITCSASQGISNYLNWYQQ |
| | | | KPDQSVKLLIYYTSSLHSGVPSRFSGSGSGTDYTLTIN |
| | | | SLEAEDAATYYCQQYSKLPRTFGGGTKVEIK |
| SEQ ID NO: 3038 | VL | C-H-VL.39 | EIVMTQTPLSLSITPGEQASISCSASQGISNYLNWYLQ |
| | | | KARPVVKLLIYYTSSLHSGVPDRFSGSGSGTDYTLKIS |
| | | | RVEAEDFGVYYCQQYSKLPRTFGGGTKVEIK |
| SEQ ID NO: 3039 | VL | C-H-VL.40 | EIVMTQTPLSLSITPGEQASMSCSASQGISNYLNWYLQ |
| | | | KARPVVKLLIYYTSSLHSGVPDRFSGSGSGTDYTLKIS |
| | | | RVEAEDFGVYYCQQYSKLPRTFGGGTKVEIK |

Humanized antibody C Variable HEAVY chain (VH)

| | | | |
|---|---|---|---|
| SEQ ID NO: 3040 | VH | C-H-VH.1 | QVTLKESGPVLVKPTETLTLTCTVSGFSLTAYGVNWVR |
| | | | QPPGKALEWLGMIWGDGNTDYNSALKSRLTISKDNSKS |
| | | | QVVLTMTNMDPVDTATYYCARDRVTATLYAMDYWGQGT |
| | | | LVTVSS |
| SEQ ID NO: 3041 | VH | C-H-VH.2 | QVTLKESGPALVKPTETLTLTCTVSGFSLTAYGVNWVR |
| | | | QPPGKALEWLGMIWGDGNTDYNSALKSRLIISKDNSKS |
| | | | QVVLTMTNMDPVDTATYYCARDRVTATLYAMDYWGQGT |
| | | | LVTVSS |
| SEQ ID NO: 3042 | VH | C-H-VH.3 | QVTLKESGPALVKPTQTLTLTCTVSGFSLTAYGVNWVR |
| | | | QPPGKALEWLGMIWGDGNTDYNSALKSRLTISKDNSKS |
| | | | QVVLTMTNMDPVDTATYYCARDRVTATLYAMDYWGQGT |
| | | | LVTVSS |
| SEQ ID NO: 3043 | VH | C-H-VH.4 | QVQLQESGPGLVKPSGTLSLTCAVSGFSLTAYGVNWVR |
| | | | QPPGKGLEWLGMIWGDGNTDYNSALKSRLTISKDNSKS |
| | | | QVSLKLSSVTAADTAVYYCARDRVTATLYAMDYWGQGT |
| | | | LVTVSS |
| SEQ ID NO: 3044 | VH | C-H-VH.5 | QVTLKESGPTLVKPTQTLTLTCTVSGFSLTAYGVNWVR |
| | | | QPPGKALEWLGMIWGDGNTDYNSALKSRLTITKDNSKS |
| | | | QVVLTMTNMDPVDTATYYCARDRVTATLYAMDYWGQGT |
| | | | LVTVSS |
| SEQ ID NO: 3045 | VH | C-H-VH.6 | QVTLKESGPALVKPTQTLTLTCTVSGFSLTAYGVNWVR |
| | | | QPPGKALEWLGMIWGDGNTDYNSALKSRLTITKDNSKS |
| | | | QVVLTMTNMDPVDTATYYCARDRVTATLYAMDYWGQGT |
| | | | LVTVSS |
| SEQ ID NO: 3046 | VH | C-H-VH.7 | QVQLQESGPGLVKPSQTLSLTCTVSGFSLTAYGVNWVR |
| | | | QPPGKGLEWLGMIWGDGNTDYNSALKSRLTISKDNSKS |
| | | | QVSLKLSSVTAADTAVYYCARDRVTATLYAMDYWGQGT |
| | | | LVTVSS |
| SEQ ID NO: 3047 | VH | C-H-VH.8 | QVQLQESGPGLVKPSETLSLTCTVSGFSLTAYGVNWVR |
| | | | QPPGKGLEWLGMIWGDGNTDYNSALKSRLTISKDNSKS |
| | | | QVSLKLSSVTAADTAVYYCARDRVTATLYAMDYWGQGT |
| | | | LVTVSS |
| SEQ ID NO: 3048 | VH | C-H-VH.9 | QVQLQESGPGLVKPSQTLSLTCAVSGFSLTAYGVNWVR |
| | | | QPPGKGLEWLGMIWGDGNTDYNSALKSRLTISKDNSKS |
| | | | QVSLKLSSVTAADTAVYYCARDRVTATLYAMDYWGQGT |
| | | | LVTVSS |
| SEQ ID NO: 3049 | VH | C-H-VH.10 | QVQLQESGPGLVKPSDTLSLTCTVSGFSLTAYGVNWVR |
| | | | QPPGKGLEWLGMIWGDGNTDYNSALKSRLTISKDNSKS |
| | | | QVSLKLSSVTAADTAVYYCARDRVTATLYAMDYWGQGT |
| | | | LVTVSS |
| SEQ ID NO: 3050 | VH | C-H-VH.11 | QVQLQESGPGLVKPSQTLSLTCTVSGFSLTAYGVNWVR |
| | | | QHPGKGLEWLGMIWGDGNTDYNSALKSRLTISKDNSKS |
| | | | QVSLKLSSVTAADTAVYYCARDRVTATLYAMDYWGQGT |
| | | | LVTVSS |
| SEQ ID NO: 3051 | VH | C-H-VH.12 | QVQLQESGPGLVKPSQTLSLTCTVSGFSLTAYGVNWVR |
| | | | QPAGKGLEWLGMIWGDGNTDYNSALKSRLTISKDNSKS |
| | | | QVSLKLSSVTAADTAVYYCARDRVTATLYAMDYWGQGT |
| | | | LVTVSS |
| SEQ ID NO: 3052 | VH | C-H-VH.13 | QVQLQESGPGLVKPSQTLSLTCAVSGFSLTAYGVNWVR |
| | | | QPPGKGLEWLGMIWGDGNTDYNSALKSRLTISKDNSKS |
| | | | QVSLKLSSVTAVDTAVYYCARDRVTATLYAMDYWGQGT |
| | | | LVTVSS |
| SEQ ID NO: 3053 | VH | C-H-VH.14 | QVQLQESGPGLVKPSETLSLTCTVSGFSLTAYGVNWVR |
| | | | QPPGKGLEWLGMIWGDGNTDYNSALKSRLTISKDNSKS |
| | | | HVSLKLSSVTAADTAVYYCARDRVTATLYAMDYWGQGT |
| | | | LVTVSS |
| SEQ ID NO: 3054 | VH | C-H-VH.15 | QVQLQESGPGLVKPSETLSLTCAVSGFSLTAYGVNWVR |
| | | | QPPGKGLEWLGMIWGDGNTDYNSALKSRLTISKDNSKS |
| | | | QVSLKLSSVTAADTAVYYCARDRVTATLYAMDYWGQGT |
| | | | LVTVSS |
| SEQ ID NO: 3055 | VH | C-H-VH.16 | QVQLQESGPGLVKPSQTLSLTCAVYGFSLTAYGVNWVR |
| | | | QPPGKGLEWLGMIWGDGNTDYNSALKSRLTISKDNSKS |
| | | | QVSLKLSSVTAADTAVYYCARDRVTATLYAMDYWGQGT |
| | | | LVTVSS |
| SEQ ID NO: 3056 | VH | C-H-VH.17 | RVQLQESGPGLVKPSETLSLTCTVSGFSLTAYGVNWVR |
| | | | QPPGKGLEWLGMIWGDGNTDYNSALKSRLTISKDNSKS |
| | | | QVPLKLSSVTAADTAVYYCARDRVTATLYAMDYWGQGT |
| | | | LVTVSS |
| SEQ ID NO: 3057 | VH | C-H-VH.18 | QVQLQESGPGLVKPSQTLSLTCTVSGFSLTAYGVNWVR |
| | | | QHPGKGLEWLGMIWGDGNTDYNSALKSLLTISKDNSKS |
| | | | QVSLKLSSVTAADTAVYYCARDRVTATLYAMDYWGQGT |
| | | | LVTVSS |
| SEQ ID NO: 3058 | VH | C-H-VH.19 | QVQLQESGPGLVKPSDTLSLTCAVSGFSLTAYGVNWVR |
| | | | QPPGKGLEWLGMIWGDGNTDYNSALKSRLTISKDNSKS |
| | | | QVSLKLSSVTALDTAVYYCARDRVTATLYAMDYWGQGT |
| | | | LVTVSS |
| SEQ ID NO: 3059 | VH | C-H-VH.20 | QVQLQESGPGLVKPSDTLSLTCAVSGFSLTAYGVNWVR |
| | | | QPPGKGLEWLGMIWGDGNTDYNSALKSRLTISKDNSKS |
| | | | QVSLKLSSVTAVDTAVYYCARDRVTATLYAMDYWGQGT |
| | | | LVTVSS |
| SEQ ID NO: 3060 | VH | C-H-VH.21 | QVQLQESGSGLVKPSQTLSLTCAVSGFSLTAYGVNWVR |
| | | | QPPGKGLEWLGMIWGDGNTDYNSALKSRLTISKDNSKS |
| | | | QVSLKLSSVTAADTAVYYCARDRVTATLYAMDYWGQGT |
| | | | LVTVSS |
| SEQ ID NO: 3061 | VH | C-H-VH.22 | EVQLVESGGGLVQPGRSLRLSCTVSGFSLTAYGVNWVR |
| | | | QAPGKGLEWLGMIWGDGNTDYNSALKSRLTISKDNSKS |
| | | | IVYLQMNSLKTEDTAVYYCARDRVTATLYAMDYWGQGT |
| | | | LVTVSS |
| SEQ ID NO: 3062 | VH | C-H-VH.23 | EVQLVESGGGLVQPGPSLRLSCTVSGFSLTAYGVNWVR |
| | | | QAPGKGLEWLGMIWGDGNTDYNSALKSRLTISKDNSKS |
| | | | IVYLQMNSLKTEDTAVYYCARDRVTATLYAMDYWGQGT |
| | | | LVTVSS |
| SEQ ID NO: 3063 | VH | C-H-VH.24 | QVQLQESGSGLVKPSQTLSLTCAVSGFSLTAYGVNWVR |
| | | | QSPGKGLEWLGMIWGDGNTDYNSALKSRLTISKDNSKS |
| | | | QVSLKLSSVTAADTAVYYCARDRVTATLYAMDYWGQGT |
| | | | LVTVSS |
| SEQ ID NO: 3064 | VH | C-H-VH.25 | QVQLQESGPGLVKPSETLSLTCTVSGFSLTAYGVNWVR |
| | | | QPAGKGLEWLGMIWGDGNTDYNSALKSRLTISKDNSKS |
| | | | QVSLKLSSVTAADTAVYYCARDRVTATLYAMDYWGQGT |
| | | | LVTVSS |
| SEQ ID NO: 3065 | VH | C-H-VH.26 | EVQLVESGGGLVKPGRSLRLSCTVSGFSLTAYGVNWVR |
| | | | QAPGKGLEWLGMIWGDGNTDYNSALKSRLTISKDNSKS |
| | | | IVYLQMNSLKTEDTAVYYCARDRVTATLYAMDYWGQGT |
| | | | LVTVSS |
| SEQ ID NO: 3066 | VH | C-H-VH.27 | QVQLQESGPGLVKPSETLSLTCAVYGFSLTAYGVNWVR |
| | | | QPPGKGLEWLGMIWGDGNTDYNSALKSRLTISKDNSKS |
| | | | QVYLKLSSVTAADTAVYYCARDRVTATLYAMDYWGQGT |
| | | | LVTVSS |
| SEQ ID NO: 3067 | VH | C-H-VH.28 | QVQLQESGPGLVKPSDTLSLTCAVSGFSLTAYGVNWVR |
| | | | QPPGKGLEWLGMIWGDGNTDYNSALKSRLTISKDNSKS |
| | | | QVSLKLSSVTAVDTGVYYCARDRVTATLYAMDYWGQGT |
| | | | LVTVSS |
| SEQ ID NO: 3068 | VH | C-H-VH.29 | EVQLVESGGGLVQPGGSLRLSCAVSGFSLTAYGVNWVR |
| | | | QAPGKGLEWLGMIWGDGNTDYNSALKSRLTISKDNSKS |
| | | | SVYLQMNSLKTEDTAVYYCARDRVTATLYAMDYWGQGT |
| | | | LVTVSS |
| SEQ ID NO: 3069 | VH | C-H-VH.30 | EVQLVESGGGLVKPGGSLRLSCAVSGFSLTAYGVNWVR |
| | | | QAPGKGLEWLGMIWGDGNTDYNSALKSRLTISKDNSKS |
| | | | TVYLQMNSLKTEDTAVYYCARDRVTATLYAMDYWGQGT |
| | | | LVTVSS |
| SEQ ID NO: 3070 | VH | C-H-VH.31 | QVQLQQSGPGLVKPSQTLSLTCAVSGFSLTAYGVNWVR |
| | | | QSPSRGLEWLGMIWGDGNTDYNSALKSRLTINKDNSKS |
| | | | QVSLQLNSVTPEDTAVYYCARDRVTATLYAMDYWGQGT |
| | | | LVTVSS |
| SEQ ID NO: 3071 | VH | C-H-VH.32 | QVQLVESGGGLVQPGGSLRLSCSVSGFSLTAYGVNWVR |
| | | | QAPGKGLEWLGMIWGDGNTDYNSALKSRLTISKDNSKS |
| | | | TVYLQMNSLRAEDTAVYYCARDRVTATLYAMDYWGQGT |
| | | | LVTVSS |
| SEQ ID NO: 3072 | VH | C-H-VH.33 | QVQLQQWGAGLLKPSETLSLTCAVYGFSLTAYGVNWVR |
| | | | QPPGKGLEWLGMIWGDGNTDYNSALKSRLTISKDNSKS |
| | | | QVSLKLSSVTAADTAVYYCARDRVTATLYAMDYWGQGT |
| | | | LVTVSS |
| SEQ ID NO: 3073 | VH | C-H-VH.34 | QVQLVESGGGVVQPGRSLRLSCAVSGFSLTAYGVNWVR |
| | | | QAPGKGLEWLGMIWGDGNTDYNSALKSRLTISKDNSTS |
| | | | TVFLQMNSLRAEDTAVYYCARDRVTATLYAMDYWGQGT |
| | | | LVTVSS |
| SEQ ID NO: 3074 | VH | C-H-VH.35 | EVQLVESGGGLVQPGGSLRLSCAVSGFSLTAYGVNWVR |
| | | | QAPGKGLEWLGMIWGDGNTDYNSALKSRLTISKDNSKS |
| | | | TVYLQMNSLRAEDTAVYYCARDRVTATLYAMDYWGQGT |
| | | | LVTVSS |
| SEQ ID NO: 3075 | VH | C-H-VH.36 | EVQLVESGGGLVQPGGSLRLSCAVSGFSLTAYGVNWVR |
| | | | QAPGKGLEWLGMIWGDGNTDYNSALKSRLTISKDNAKS |
| | | | SVYLQMNSLRDEDTAVYYCARDRVTATLYAMDYWGQGT |
| | | | LVTVSS |
| SEQ ID NO: 3076 | VH | C-H-VH.37 | EVQLLESGGGLVQPGGSLRLSCAVSGFSLTAYGVNWVR |
| | | | QAPGKGLEWLGMIWGDGNTDYNSALKSRLTISKDNSKS |
| | | | TVYLQMNSLRAEDTAVYYCARDRVTATLYAMDYWGQGT |
| | | | LVTVSS |
| SEQ ID NO: 3077 | VH | C-H-VH.38 | QVQLVESGGGLVKPGGSLRLSCAVSGFSLTAYGVNWVR |
| | | | QAPGKGLEWLGMIWGDGNTDYNSALKSRLTISKDNAKS |
| | | | SVYLQMNSLRAEDTAVYYCARDRVTATLYAMDYWGQGT |
| | | | LVTVSS |
| SEQ ID NO: 3078 | VH | C-H-VH.39 | EVQLVESGGGLVQPGGSLKLSCAVSGFSLTAYGVNWVR |
| | | | QASGKGLEWLGMIWGDGNTDYNSALKSRLTISKDNSKS |
| | | | TVYLQMNSLKTEDTAVYYCARDRVTATLYAMDYWGQGT |
| | | | LVTVSS |
| SEQ ID NO: 3079 | VH | C-H-VH.40 | QVQLLESGGGLVKPGGSLRLSCAVSGFSLTAYGVNWVR |
| | | | QAPGKGLEWLGMIWGDGNTDYNSALKSRLTISKDNAKS |
| | | | SVYLQMNSLRAEDTAVYYCARDRVTATLYAMDYWGQGT |
| | | | LVTVSS |
| SEQ ID NO: 3080 | VH | C-H-VH.41 | QVQLVESGGGVVQPGRSLRLSCAVSGFSLTAYGVNWVR |
| | | | QAPGKGLEWLGMIWGDGNTDYNSALKSRLTISKDNSKS |
| | | | TVYLQMNSLRAEDTAVYYCARDRVTATLYAMDYWGQGT |
| | | | LVTVSS |
| SEQ ID NO: 3081 | VH | C-H-VH.42 | QVQLVESGGGVVQPGRSLRLSCAVSGFSLTAYGVNWVR |
| | | | QAPGKGLEWLGMIWGDGNTDYNSALKSRLTISKDNSKS |
| | | | RVYLQMNSLRAEDTAVYYCARDRVTATLYAMDYWGQGT |
| | | | LVTVSS |
| SEQ ID NO: 3082 | VH | C-H-VH.43 | QVQLVESGGGVVQPGRSLRLSCAVSGFSLTAYGVNWVR |
| | | | QAPGKGLEWLGMIWGDGNTDYNSALKSRLAISKDNSKS |
| | | | TVYLQMNSLRAEDTAVYYCARDRVTATLYAMDYWGQGT |
| | | | LVTVSS |
| SEQ ID NO: 3083 | VH | C-H-VH.44 | QVQLVESGGGVVQPGGSLRLSCAVSGFSLTAYGVNWVR |
| | | | QAPGKGLEWLGMIWGDGNTDYNSALKSRLTISKDNSKS |
| | | | TVYLQMNSLRAEDTAVYYCARDRVTATLYAMDYWGQGT |
| | | | LVTVSS |
| SEQ ID NO: 3084 | VH | C-H-VH.45 | EVQLVESGGGLVQPGGSLRLSCAVSGFSLTAYGVNWVR |
| | | | QAPGKGLEWLGMIWGDGNTDYNSALKSRLTISKDNAKS |
| | | | TVYLQMNSLRAEDTAVYYCARDRVTATLYAMDYWGQGT |
| | | | LVTVSS |
| SEQ ID NO: 3085 | VH | C-H-VH.46 | EVQLVESGGGLVQPGGSLRLSCAVSGFSLTAYGVNWVR |
| | | | QAPGKGLEWLGMIWGDGNTDYNSALKSRLTISKDNAKS |
| | | | SVYLQMNSLRAEDTAVYYCARDRVTATLYAMDYWGQGT |
| | | | LVTVSS |
| SEQ ID NO: 3086 | VH | C-H-VH.47 | EVQLVESGGVVVQPGGSLRLSCAVSGFSLTAYGVNWVR |
| | | | QAPGKGLEWLGMIWGDGNTDYNSALKSRLTISKDNSKS |
| | | | SVYLQMNSLRTEDTALYYCARDRVTATLYAMDYWGQGT |
| | | | LVTVSS |
| SEQ ID NO: 3087 | VH | C-H-VH.48 | EVQLVESGGGLVQPGGSLRLSCAVSGFSLTAYGVNWVR |
| | | | QAPGKGLEWLGMIWGDGNTDYNSALKSRLTISKHNSKS |
| | | | TVYLQMNSLRAEDTAVYYCARDRVTATLYAMDYWGQGT |
| | | | LVTVSS |
| SEQ ID NO: 3088 | VH | C-H-VH.49 | EVQLVESGGGLVKPGGSLRLSCAVSGFSLTAYGVNWVR |
| | | | QAPGKGLEWLGMIWGDGNTDYNSALKSRLTISKDNAKS |
| | | | SVYLQMNSLRAEDTAVYYCARDRVTATLYAMDYWGQGT |
| | | | LVTVSS |
| SEQ ID NO: 3089 | VH | C-H-VH.50 | EVQLVESGGGLIQPGGSLRLSCAVSGFSLTAYGVNWVR |
| | | | QPPGKGLEWLGMIWGDGNTDYNSALKSRLTISKDNSKS |
| | | | TVYLQMNSLRAEDTAVYYCARDRVTATLYAMDYWGQGT |
| | | | LVTVSS |

[0742] Exemplary anti-TCRβ V5 antibodies of the disclosure are provided in Table 11A. In some embodiments, the anti-TCRβ V5 is antibody E, e.g., humanized antibody E (antibody E-H), as provided in Table 11A. In some embodiments, the anti-TCRβV antibody comprises one or more (e.g., all three) of a LC CDR1, LC CDR2, and LC CDR3 provided in Table 11A; and/or one or more (e.g., all three) of a HC CDR1, HC CDR2, and HC CDR3 provided in Table 11A, or a sequence with at least 95% identity thereto. In some embodiments, antibody E comprises a variable heavy chain (VH) and/or a variable light chain (VL) provided in Table 11A, or a sequence with at least 95% identity thereto.

[0743] In some embodiments, antibody E comprises a heavy chain comprising the amino acid sequence of SEQ ID NO: 3284 and/or a light chain comprising the amino acid sequence of SEQ ID NO: 3285, or sequence with at least 95% identity thereto.

TABLE 11A
Amino acid sequences for anti TCRβ V5 antibodies
Amino acid and nucleotide sequences for murine and humanized
antibody molecules which bind to TCRVB 5 (e.g., TCRVB 5-5 or
TCRVB 5-6). The amino acid the heavy and light chain CDRs, and
the amino acid and nucleotide sequences of the heavy and light
chain variable regions, and the heavy and light chains are shown.
Murine antibody E

| | | |
|---|---|---|
| SEQ ID NO: 1298 | HC CDR1 (Kabat) | SSWMN |
| SEQ ID NO: 1299 | HC CDR2 (Kabat) | RIYPGDGDTKYNGKFKG |
| SEQ ID NO: 1300 | HC CDR3 (Kabat) | RGTGGWYFDV |
| SEQ ID NO: 1302 | HC CDR1 (Chothia) | GYAFSSS |
| SEQ ID NO: 1303 | HC CDR2 (Chothia) | YPGDGD |
| SEQ ID NO: 1301 | HC CDR3 (Chothia) | RGTGGWYFDV |
| SEQ ID NO: 1304 | HC CDR1 (Combined) | GYAFSSSWMN |
| SEQ ID NO: 1299 | HC CDR2 (Combined) | RIYPGDGDTKYNGKFKG |
| SEQ ID NO: 1301 | HC CDR3(Combined) | RGTGGWYFDV |
| SEQ ID NO: 1305 | LC CDR1 (Kabat) | RASESVDSSGNSFMH |
| SEQ ID NO: 1306 | LC CDR2 (Kabat) | RASNLES |
| SEQ ID NO: 1307 | LC CDR3 (Kabat) | QQSFDDPFT |
| SEQ ID NO: 1308 | LC CDR1 (Chothia) | SESVDSSGNSF |
| SEQ ID NO: 1306 | LC CDR2 (Chothia) | RASNLES |
| SEQ ID NO: 1307 | LC CDR3 (Chothia) | QQSFDDPFT |
| SEQ ID NO: 1305 | LC CDR1 (Combined) | RASESVDSSGNSFMH |
| SEQ ID NO: 1306 | LC CDR2 (Combined) | RASNLES |
| SEQ ID NO: 1307 | LC CDR3(Combined) | QQSFDDPFT |
| SEQ ID NO: 3091 | VH | QVQLQQSGPELVKPGASVKISCKASGYAFSSSWMN |
| | | WVKQRPGQGLEWIGRIYPGDGDTKYNGKFKGKATL |
| | | TADKSSSTAYMHLSSLTSVDSAVYFCARRGTGGWY |
| | | FDVWGAGTTVTVSS |
| SEQ ID NO: 3284 | Heavy chain | METDTLLLWVLLLWVPGSTGQVQLQQSGPELVKPG |
| | | ASVKISCKASGYAFSSSWMNWVKQRPGQGLEWIGR |
| | | IYPGDGDTKYNGKFKGKATLTADKSSSTAYMHLSS |
| | | LTSVDSAVYFCARRGTGGWYFDVWGAGTTVTVSSA |
| | | KTTAPSVYPLAPVCGDTTGSSVTLGCLVKGYFPEP |
| | | VTLTWNSGLSLSSGVHTFPAVLQSDLYTLSSSVTV |
| | | SSTWPSQSITCNVAHPASSTKVDKKIEPRGPTIKP |
| | | CPPCKCPAPNLLGGPSVFIFPPKIKDVLMISLSPI |
| | | VTCVVVDVSEDDPDVQISWFVNNVEVHTAQTQTHR |
| | | EDYNSTLRVVSALPIQHQDWMSGKEFKCKVNNKDL |
| | | PAPIERTISKPKGSVRAPQVYVLPPPEEEMTKKQV |
| | | TLTCMVTDFMPEDIYVEETNNGKTELNYKNTEPVL |
| | | DSDGSYFMYSKLRVEKKNWVERNSYSCSVVHEGLH |
| | | NHHTTKSFSRTPGK |
| SEQ ID NO: 3092 | VL | DIVLTQSPASLAVSLGQRATISCRASESVDSSGNS |
| | | FMHWYQQKPGQPPQLLIYRASNLESGIPARFSGSG |
| | | SRTDFTLTINPVEADDVATFYCQQSFDDPFTFGSG |
| | | TKLEIK |
| SEQ ID NO: 3285 | Light chain | MEDTDTLLLWVLLLWVPGSTGDIVLTQSPASLAVS |
| | | LGQRATISCRASESVDSSGNSFMHWYQQKPGQPPQ |
| | | LLIYRASNLESGIPARFSGSGSRTDFTLTINPVEA |
| | | DDVATFYCQQSFDDPFTFGSGTKLEIKRADAAPTV |
| | | SIFPPSSEQLTSGGASVVCLFLNNFYPKDINVKWK |
| | | IDGSERQNGVLNSWTDQDSKDSTYSMSSTLTKTKD |
| | | EYERHNSYTCEATHKTSTSPIVKSFNRNEC |

Humanized antibody E(E-H antibody)
Variable light chain (VL)

| | | | |
|---|---|---|---|
| SEQ ID NO: 3093 | VL | E-H. 1 | DIVLTQSPDSLAVSLGERATINCRASESVDSSGNS |
| | | | FMHWYQQKPGQPPQLLIYRASNLESGVPDRFSGSG |
| | | | SRTDFTLTISSLQAEDVAVYYCQQSFDDPFTFGQG |
| | | | TKLEIK |
| SEQ ID NO: 3094 | VL | E-H.2 | EIVLTQSPATLSLSPGERATLSCRASESVDSSGNS |
| | | | FMHWYQQKPGQAPQLLIYRASNLESGIPARFSGSG |
| | | | SRTDFTLTISSLEPEDFAVYYCQQSFDDPFTFGQG |
| | | | TKLEIK |
| SEQ ID NO: 3095 | VL | E-H.3 | EIVLTQSPATLSLSPGERATLSCRASESVDSSGNS |
| | | | FMHWYQQKPGQAPQLLIYRASNLESGIPARFSGSG |
| | | | SRTDFTLTISRLEPEDFAVYYCQQSFDDPFTFGQG |
| | | | TKLEIK |
| SEQ ID NO: 3096 | VL | E-H.4 | EIVLTQSPATLSLSPGERATLSCRASESVDSSGNS |
| | | | FMHWYQQKPGQAPQLLIYRASNLESGIPARFSGSG |
| | | | SRTDFTLTISSLQPEDFAVYYCQQSFDDPFTFGQG |
| | | | TKLEIK |
| SEQ ID NO: 3097 | VL | E-H.5 | DIQLTQSPSSLSASVGDRVTITCRASESVDSSGNS |
| | | | FMHWYQQKPGQAPQLLIYRASNLESGVPSRFSGSG |
| | | | SRTDFTLTISSLQPEDVATYYCQQSFDDPFTFGQG |
| | | | TKLEIK |
| SEQ ID NO: 3098 | VL | E-H.6 | EIVLTQSPATLSLSPGERATLSCRASESVDSSGNS |
| | | | FMHWYQQKPGQAPQLLIYRASNLESGIPARFSGSG |
| | | | PRTDFTLTISSLEPEDFAVYYCQQSFDDPFTFGQG |
| | | | TKLEIK |
| SEQ ID NO: 3099 | VL | E-H.7 | EIVLTQSPATLSLSPGERATLSCRASESVDSSGNS |
| | | | FMHWYQQKPGQAPQLLIYRASNLESGIPDRFSGSG |
| | | | SRTDFTLTISRLEPEDFAVYYCQQSFDDPFTFGQG |
| | | | TKLEIK |
| SEQ ID NO: 3100 | VL | E-H.8 | DIQLTQSPSSLSASVGDRVTITCRASESVDSSGNS |
| | | | FMHWYQQKPGKVPQLLIYRASNLESGVPSRFSGSG |
| | | | SRTDFTLTISSLQPEDVATYYCQQSFDDPFTFGQG |
| | | | TKLEIK |
| SEQ ID NO: 3101 | VL | E-H.9 | DIQLTQSPSSLSASVGDRVTITCRASESVDSSGNS |
| | | | FMHWYQQKPGKTPQLLIYRASNLESGIPSRFSGSG |
| | | | SRTDFTLTIRSLQPEDFATYYCQQSFDDPFTFGQG |
| | | | TKLEIK |
| SEQ ID NO: 3102 | VL | E-H.10 | EIVLTQSPGTLSLSPGERATLSCRASESVDSSGNS |
| | | | FMHWYQQKPGQAPQLLIYRASNLESGIPDRFSGSG |
| | | | SRTDFTLTISRLEPEDFAVYYCQQSFDDPFTFGQG |
| | | | TKLEIK |
| SEQ ID NO: 3103 | VL | E-H.11 | EIVLTQSPATLSLSPGERATLSCRASESVDSSGNS |
| | | | FMHWYQQKPGLAPQLLIYRASNLESGIPDRFSGSG |
| | | | SRTDFTLTISRLEPEDFAVYYCQQSFDDPFTFGQG |
| | | | TKLEIK |
| SEQ ID NO: 3104 | VL | E-H.12 | DIQLTQSPSSLSASVGDRVTITCRASESVDSSGNS |
| | | | FMHWYQQKPGKAPQLLIYRASNLESGVPSRFSGSG |
| | | | SRTDFTLTISSLQPEDFATYYCQQSFDDPFTFGQG |
| | | | TKLEIK |
| SEQ ID NO: 3105 | VL | E-H.13 | DIQLTQSPSSVSASVGDRVTITCRASESVDSSGNS |
| | | | FMHWYQQKPGKAPQLLIYRASNLESGVPSRFSGSG |
| | | | SRTDFTLTISSLQPEDFATYYCQQSFDDPFTFGQG |
| | | | TKLEIK |
| SEQ ID NO: 3106 | VL | E-H.14 | AIQLTQSPSSLSASVGDRVTITCRASESVDSSGNS |
| | | | FMHWYQQKPGKAPQLLIYRASNLESGVPSRFSGSG |
| | | | SRTDFTLTISSLQPEDFATYYCQQSFDDPFTFGQG |
| | | | TKLEIK |
| SEQ ID NO: 3107 | VL | E-H.15 | DIQLTQSPSFLSASVGDRVTITCRASESVDSSGNS |
| | | | FMHWYQQKPGKAPQLLIYRASNLESGVPSRFSGSG |
| | | | SRTEFTLTISSLQPEDFATYYCQQSFDDPFTFGQG |
| | | | TKLEIK |
| SEQ ID NO: 3108 | VL | E-H.16 | DIQLTQSPSSLSASVGDRVTITCRASESVDSSGNS |
| | | | FMHWYQQKPGKAPQLLIYRASNLESGVPSRFSGSG |
| | | | SRTDFTFTISSLQPEDIATYYCQQSFDDPFTFGQG |
| | | | TKLEIK |
| SEQ ID NO: 3109 | VL | E-H.17 | EIVLTQSPATLSVSPGERATLSCRASESVDSSGNS |
| | | | FMHWYQQKPGQAPQLLIYRASNLESGIPARFSGSG |
| | | | SRTEFTLTISILQSEDFAVYYCQQSFDDPFTFGQG |
| | | | TKLEIK |
| SEQ ID NO: 3110 | VL | E-H.18 | EIVLTQSPATLSVSPGERATLSCRASESVDSSGNS |
| | | | FMHWYQQKPGQAPQLLIYRASNLESGIPARFSGSG |
| | | | SRTEFTLTISSLQSEDFAVYYCQQSFDDPFTFGQG |
| | | | TKLEIK |
| SEQ ID NO: 3111 | VL | E-H.19 | AIRLTQSPFSLSASVGDRVTITCRASESVDSSGNS |
| | | | FMHWYQQKPAKAPQLFIYRASNLESGVPSRFSGSG |
| | | | SRTDFTLTISSLQPEDFATYYCQQSFDDPFTFGQG |
| | | | TKLEIK |
| SEQ ID NO: 3112 | VL | E-H.20 | DIQLTQSPSSLSASVGDRVTITCRASESVDSSGNS |
| | | | FMHWYQQKPGKAPQSLIYRASNLESGVPSRFSGSG |
| | | | SRTDFTLTISSLQPEDFATYYCQQSFDDPFTFGQG |
| | | | TKLEIK |
| SEQ ID NO: 3113 | VL | E-H.21 | DIQLTQSPSSLSASVGDRVTITCRASESVDSSGNS |
| | | | FMHWYQQKPGKAPQRLIYRASNLESGVPSRFSGSG |
| | | | SRTEFTLTISNLQPEDFATYYCQQSFDDPFTFGQG |
| | | | TKLEIK |
| SEQ ID NO: 3114 | VL | E-H.22 | DIQLTQSPSTLSASVGDRVTITCRASESVDSSGNS |
| | | | FMHWYQQKPGKAPQLLIYRASNLESGVPSRFSGSG |
| | | | SRTEFTLTISSLQPDDFATYYCQQSFDDPFTFGQG |
| | | | TKLEIK |
| SEQ ID NO: 3115 | VL | E-H.23 | EIVLTQSPDFQSVTPKEKVTITCRASESVDSSGNS |
| | | | FMHWYQQKPDQSPQLLIYRASNLESGVPSRFSGSG |
| | | | SRTDFTLTINSLEAEDAATYYCQQSFDDPFTFGQG |
| | | | TKLEIK |
| SEQ ID NO: 3116 | VL | E-H.24 | DIQLTQSPSSLSASVGDRVTITCRASESVDSSGNS |
| | | | FMHWYQQKPGKAPQSLIYRASNLESGVPSKFSGSG |
| | | | SRTDFTLTISSLQPEDFATYYCQQSFDDPFTFGQG |
| | | | TKLEIK |
| SEQ ID NO: 3117 | VL | E-H.25 | DIQLTQSPSSLSASVGDRVTITCRASESVDSSGNS |
| | | | FMHWYQQKPGKAPQRLIYRASNLESGVPSRFSGSG |
| | | | SRTEFTLTISSLQPEDFATYYCQQSFDDPFTFGQG |
| | | | TKLEIK |
| SEQ ID NO: 3118 | VL | E-H.26 | DIVLTQTPLSLSVTPGQPASISCRASESVDSSGNS |
| | | | FMHWYLQKPGQPPQLLIYRASNLESGVPDRFSGSG |
| | | | SRTDFTLKISRVEAEDVGVYYCQQSFDDPFTFGQG |
| | | | TKLEIK |
| SEQ ID NO: 3119 | VL | E-H.27 | DIQLTQSPSSLSASVGDRVTITCRASESVDSSGNS |
| | | | FMHWYQQKPEKAPQSLIYRASNLESGVPSRFSGSG |
| | | | SRTDFTLTISSLQPEDFATYYCQQSFDDPFTFGQG |
| | | | TKLEIK |
| SEQ ID NO: 3120 | VL | E-H.28 | EIVLTQSPPTLSLSPGERVTLSCRASESVDSSGNS |
| | | | FMHWYQQKPGQAPQLLIYRASNLESGIPARFSGSG |
| | | | SRTDFTLTISSLQPEDFAVYYCQQSFDDPFTFGQG |
| | | | TKLEIK |
| SEQ ID NO: 3121 | VL | E-H.29 | DIQLTQSPSAMSASVGDRVTITCRASESVDSSGNS |
| | | | FMHWYQQKPGKVPQRLIYRASNLESGVPSRFSGSG |
| | | | SRTEFTLTISSLQPEDFATYYCQQSFDDPFTFGQG |
| | | | TKLEIK |
| SEQ ID NO: 3122 | VL | E-H.30 | DIVLTQSPLSLPVTPGEPASISCRASESVDSSGNS |
| | | | FMHWYLQKPGQSPQLLIYRASNLESGVPDRFSGSG |
| | | | SRTDFTLKISRVEAEDVGVYYCQQSFDDPFTFGQG |
| | | | TKLEIK |
| SEQ ID NO: 3123 | VL | E-H.31 | DIVLTQTPLSLPVTPGEPASISCRASESVDSSGNS |
| | | | FMHWYLQKPGQSPQLLIYRASNLESGVPDRFSGSG |
| | | | SRTDFTLKISRVEAEDVGVYYCQQSFDDPFTFGQG |
| | | | TKLEIK |
| SEQ ID NO: 3124 | VL | E-H.32 | DIVLTQTPLSLSVTPGQPASISCRASESVDSSGNS |
| | | | FMHWYLQKPGQSPQLLIYRASNLESGVPDRFSGSG |
| | | | SRTDFTLKISRVEAEDVGVYYCQQSFDDPFTFGQG |
| | | | TKLEIK |
| SEQ ID NO: 3125 | VL | E-H.33 | EIVLTQSPPTLSLSPGERVTLSCRASESVDSSGNS |
| | | | FMHWYQQKPGQAPQLLIYRASNLESSIPARFSGSG |
| | | | SRTDFTLTISSLQPEDFAVYYCQQSFDDPFTFGQG |
| | | | TKLEIK |
| SEQ ID NO: 3126 | VL | E-H.34 | DIVLTQSPLSLPVTLGQPASISCRASESVDSSGNS |
| | | | FMHWYQQRPGQSPQRLIYRASNLESGVPDRFSGSG |
| | | | SRTDFTLKISRVEAEDVGVYYCQQSFDDPFTFGQG |
| | | | TKLEIK |
| SEQ ID NO: 3127 | VL | E-H.35 | DIVLTQTPLSSPVTLGQPASISCRASESVDSSGNS |
| | | | FMHWYQQRPGQPPQLLIYRASNLESGVPDRFSGSG |
| | | | ARTDFTLKISRVEAEDVGVYYCQQSFDDPFTFGQG |
| | | | TKLEIK |
| SEQ ID NO: 3128 | VL | E-H.36 | DIVLTQSPAFLSVTPGEKVTITCRASESVDSSGNS |
| | | | FMHWYQQKPDQAPQLLIYRASNLESGVPSRFSGSG |
| | | | SRTDFTFTISSLEAEDAATYYCQQSFDDPFTFGQG |
| | | | TKLEIK |
| SEQ ID NO: 3129 | VL | E-H.37 | DIQLIQSPSFLSASVGDRVSIICRASESVDSSGNS |
| | | | FMHWYLQKPGKSPQLFIYRASNLESGVSSRFSGRG |
| | | | SRTDFTLTIISLKPEDFAAYYCQQSFDDPFTFGQG |
| | | | TKLEIK |
| SEQ ID NO: 3130 | VL | E-H.38 | EIVLTQTPLSLSITPGEQASISCRASESVDSSGNS |
| | | | FMHWYLQKARPVPQLLIYRASNLESGVPDRFSGSG |
| | | | SRTDFTLKISRVEAEDFGVYYCQQSFDDPFTFGQG |
| | | | TKLEIK |
| SEQ ID NO: 3131 | VL | E-H.39 | EIVLTQTPLSLSITPGEQASMSCRASESVDSSGNS |
| | | | FMHWYLQKARPVPQLLIYRASNLESGVPDRFSGSG |
| | | | SRTDFTLKISRVEAEDFGVYYCQQSFDDPFTFGQG |
| | | | TKLEIK |
| SEQ ID NO: 3132 | VL | E-H.40 | EITLTQSPAFMSATPGDKVNISCRASESVDSSGNS |
| | | | FMHWYQQKPGEAPQFIIYRASNLESGIPPRFSGSG |
| | | | YRTDFTLTINNIESEDAAYYYCQQSFDDPFTFGQG |
| | | | TKLEIK |

Variable HEAVY chain (VH)

| | | | |
|---|---|---|---|
| SEQ ID NO: 3133 | VH | E-H.1 | QVQLVQSGAEVKKPGASVKVSCKASGYAFSSSWMN |
| | | | WVRQAPGQGLEWIGRIYPGDGDTKYNGKFKGRATL |
| | | | TADKSTSTAYMELSSLRSEDTAVYYCARRGTGGWY |
| | | | FDVWGQGTTVTVSS |
| SEQ ID NO: 3134 | VH | E-H.2 | QVQLVQSGAEVKKPGSSVKVSCKASGYAFSSSWMN |
| | | | WVRQAPGQGLEWIGRIYPGDGDTKYNGKFKGRATL |
| | | | TADKSTSTAYMELSSLRSEDTAVYYCARRGTGGWY |
| | | | FDVWGQGTTVTVSS |
| SEQ ID NO: 3135 | VH | E-H.3 | QVQLVQSGAEVKKPGASVKVSCKASGYAFSSSWMN |
| | | | WVRQAPGKGLEWIGRIYPGDGDTKYNGKFKGRATL |
| | | | TADKSTSTAYMELSSLRSEDTAVYYCARRGTGGWY |
| | | | FDVWGQGTTVTVSS |
| SEQ ID NO: 3136 | VH | E-H.4 | QVQLVQSGAEVKKPGASVKVSCKASGYAFSSSWMN |
| | | | WVRQAPGQELEWIGRIYPGDGDTKYNGKFKGRATL |
| | | | TADKSISTAYMELSSLRSEDTATYYCARRGTGGWY |
| | | | FDVWGQGTTVTVSS |
| SEQ ID NO: 3137 | VH | E-H.5 | EVQLVQSGAEVKKPGATVKISCKASGYAFSSSWMN |
| | | | WVQQAPGKGLEWIGRIYPGDGDTKYNGKFKGRATL |
| | | | TADKSTSTAYMELSSLRSEDTAVYYCARRGTGGWY |
| | | | FDVWGQGTTVTVSS |
| SEQ ID NO: 3138 | VH | E-H.6 | QVQLVQSGAEVKKTGSSVKVSCKASGYAFSSSWMN |
| | | | WVRQAPGQALEWIGRIYPGDGDTKYNGKFKGRATL |
| | | | TADKSMSTAYMELSSLRSEDTAMYYCARRGTGGWY |
| | | | FDVWGQGTTVTVSS |
| SEQ ID NO: 3139 | VH | E-H.7 | QVQLVQSGAEVKKPGASVKVSCKASGYAFSSSWMN |
| | | | WVRQAPGQRLEWIGRIYPGDGDTKYNGKFKGRATL |
| | | | TADKSASTAYMELSSLRSEDMAVYYCARRGTGGWY |
| | | | FDVWGQGTTVTVSS |
| SEQ ID NO: 3140 | VH | E-H. 8 | QVQLVQSGAEVKKPGASVKVSCKASGYAFSSSWMN |
| | | | WVRQAPGQGLEWIGRIYPGDGDTKYNGKFKGRATL |
| | | | TADKSTSTAYMELRSLRSDDMAVYYCARRGTGGWY |
| | | | FDVWGQGTTVTVSS |
| SEQ ID NO: 3141 | VH | E-H.9 | QVQLVQSGAEVKKPGASVKVSCKASGYAFSSSWMN |
| | | | WVRQAPGQRLEWIGRIYPGDGDTKYNGKFKGRATL |
| | | | TADKSASTAYMELSSLRSEDTAVYYCARRGTGGWY |
| | | | FDVWGQGTTVTVSS |
| SEQ ID NO: 3142 | VH | E-H.10 | QVQLVQSGAEVKKPGASVKVSCKASGYAFSSSWMN |
| | | | WVRQAPGQGLEWIGRIYPGDGDTKYNGKFKGRATL |
| | | | TADKSTSTAYMELRSLRSDDTAVYYCARRGTGGWY |
| | | | FDVWGQGTTVTVSS |
| SEQ ID NO: 3143 | VH | E-H.11 | QVQLVQSGAEVKKPGASVKVSCKASGYAFSSSWMN |
| | | | WVRQAPGQGLEWIGRIYPGDGDTKYNGKFKGRATL |
| | | | TADKSISTAYMELSRLRSDDTAVYYCARRGTGGWY |
| | | | FDVWGQGTTVTVSS |
| SEQ ID NO: 3144 | VH | E-H.12 | QVQLVQSGAEVKKPGASVKVSCKASGYAFSSSWMN |
| | | | WVRQAPGQGLEWIGRIYPGDGDTKYNGKFKGRATL |
| | | | TADKSISTAYMELSRLRSDDTVVYYCARRGTGGWY |
| | | | FDVWGQGTTVTVSS |
| SEQ ID NO: 3145 | VH | E-H.13 | QVQLVQSGAEVKKPGASVKVSCKASGYAFSSSWMN |
| | | | WVRQAPGQGLEWIGRIYPGDGDTKYNGKFKGWATL |
| | | | TADKSISTAYMELSRLRSDDTAVYYCARRGTGGWY |
| | | | FDVWGQGTTVTVSS |
| SEQ ID NO: 3146 | VH | E-H.14 | QVQLVQSGAEVKKPGASVKVSCKASGYAFSSSWMN |
| | | | WVRQATGQGLEWIGRIYPGDGDTKYNGKFKGRATL |
| | | | TANKSISTAYMELSSLRSEDTAVYYCARRGTGGWY |
| | | | FDVWGQGTTVTVSS |
| SEQ ID NO: 3147 | VH | E-H.15 | QVLQVQSGSELKKPGASVKVSCKASGYAFSSSWMN |
| | | | WVRQAPGQGLEWIGRIYPGDGDTKYNGKFKGRAVL |
| | | | SADKSVSTAYLQISSLKAEDTAVYYCARRGTGGWY |
| | | | FDVWGQGTTVTVSS |
| SEQ ID NO: 3148 | VH | E-H.16 | QVQLVQSGPEVKKPGTSVKVSCKASGYAFSSSWMN |
| | | | WVRQARGQRLEWIGRIYPGDGDTKYNGKFKGRATL |
| | | | TADKSTSTAYMELSSLRSEDTAVYYCARRGTGGWY |
| | | | FDVWGQGTTVTVSS |
| SEQ ID NO: 3149 | VH | E-H.17 | EVQLVQSGAEVKKPGESLKISCKASGYAFSSSWMN |
| | | | WVRQMPGKGLEWIGRIYPGDGDTKYNGKFKGQATL |
| | | | SADKSISTAYLQWSSLKASDTAMYYCARRGTGGWY |
| | | | FDVWGQGTTVTVSS |
| SEQ ID NO: 3150 | VH | E-H.18 | QVQLVQSGSELKKPGASVKVSCKASGYAFSSSWMN |
| | | | WVRQAPGQGLEWIGRIYPGDGDTKYNGKFKGRAVL |
| | | | SADKSVSMAYLQISSLKAEDTAVYYCARRGTGGWY |
| | | | FDVWGQGTTVTVSS |
| SEQ ID NO: 3151 | VH | E-H.19 | QVQLVQSGHEVKQPGASVKVSCKASGYAFSSSWMN |
| | | | WVPQAPGQGLEWIGRIYPGDGDTKYNGKFKGRAVL |
| | | | SADKSASTAYLQISSLKAEDMAMYYCARRGTGGWY |
| | | | FDVWGQGTTVTVSS |
| SEQ ID NO: 3152 | VH | E-H.20 | EVQLVQSGAEVKKPGESLKISCKASGYAFSSSWMN |
| | | | WVRQMPGKGLEWIGRIYPGDGDTKYNGKFKGQATL |
| | | | SADKPISTAYLQWSSLKASDTAMYYCARRGTGGWY |
| | | | FDVWGQGTTVTVSS |
| SEQ ID NO: 3153 | VH | E-H.21 | EVQLVQSGAEVKKPGESLRISCKASGYAFSSSWMN |
| | | | WVRQMPGKGLEWIGRIYPGDGDTKYNGKFKGQATL |
| | | | SADKSISTAYLQWSSLKASDTAMYYCARRGTGGWY |
| | | | FDVWGQGTTVTVSS |
| SEQ ID NO: 3154 | VH | E-H.22 | EVQLVQSGAEVKKPGESLRISCKASGYAFSSSWMN |
| | | | WVRQMPGKGLEWIGRIYPGDGDTKYNGKFKGHATL |
| | | | SADKSISTAYLQWSSLKASDTAMYYCARRGTGGWY |
| | | | FDVWGQGTTVTVSS |
| SEQ ID NO: 3155 | VH | E-H.23 | QVQLVQSGAEVKKTGSSVKVSCKASGYAFSSSWMN |
| | | | WVRQAPRQALEWIGRIYPGDGDTKYNGKFKGRATL |
| | | | TADKSMSTAYMELSSLRSEDTAMYYCARRGTGGWY |
| | | | FDVWGQGTTVTVSS |
| SEQ ID NO: 3156 | VH | E-H.24 | EVQLVESGGGLVQPGRSLRLSCTASGYAFSSSWMN |
| | | | WVRQAPGKGLEWIGRIYPGDGDTKYNGKFKGRATL |
| | | | SADKSKSIAYLQMNSLKTEDTAVYYCARRGTGGWY |
| | | | FDVWGQGTTVTVSS |
| SEQ ID NO: 3157 | VH | E-H.25 | EVQLVESGGGLVQPGPSLRLSCTASGYAFSSSWMN |
| | | | WVRQAPGKGLEWIGRIYPGDGDTKYNGKFKGRATL |
| | | | SADKSKSIAYLQMNSLKTEDTAVYYCARRGTGGWY |
| | | | FDVWGQGTTVTVSS |
| SEQ ID NO: 3158 | VH | E-E.26 | QVQLQESGPGLVKPSQTLSLTCTASGYAFSSSWMN |
| | | | WVRQPPGKGLEWIGRIYPGDGDTKYNGKFKGRATL |
| | | | SADKSKSQASLKLSSVTAADTAVYYCARRGTGGWY |
| | | | FDVWGQGTTVTVSS |
| SEQ ID NO: 3159 | VH | E-E.27 | QVQLQESGPGLVKPSGTLSLTCAASGYAFSSSWMN |
| | | | WVRQPPGKGLEWIGRIYPGDGDTKYNGKFKGRATL |
| | | | SADKSKSQASLKLSSVTAADTAVYYCARRGTGGWY |
| | | | FDVWGQGTTVTVSS |
| SEQ ID NO: 3160 | VH | E-H.28 | EVQLVESGGGLVKPGRSLRLSCTASGYAFSSSWMN |
| | | | WVRQAPGKGLEWIGRIYPGDGDTKYNGKFKGRATL |
| | | | SADKSKSIAYLQMNSLKTEDTAVYYCARRGTGGWY |
| | | | FDVWGQGTTVTVSS |
| SEQ ID NO: 3161 | VH | E-H.29 | EVQLVESGGGLVQPGGSLKLSCAASGYAFSSSWMN |
| | | | WVRQASGKGLEWIGRIYPGDGDTKYNGKFKGRATL |
| | | | SADKSKSTAYLQMNSLKTEDTAVYYCARRGTGGWY |
| | | | FDVWGQGTTVTVSS |
| SEQ ID NO: 3162 | VH | E-H.30 | QVQLQESGPGLVKPSQTLSLTCAASGYAFSSSWMN |
| | | | WVRQPPGKGLEWIGRIYPGDGDTKYNGKFKGRATL |
| | | | SADKSKSQASLKLSSVTAADTAVYYCARRGTGGWY |
| | | | FDVWGQGTTVTVSS |
| SEQ ID NO: 3163 | VH | E-H.31 | EVQLVESGGGLVKPGGSLRLSCAASGYAFSSSWMN |
| | | | WVRQAPGKGLEWIGRIYPGDGDTKYNGKFKGRATL |
| | | | SADKSKSTAYLQMNSLKTEDTAVYYCARRGTGGWY |
| | | | FDVWGQGTTVTVSS |
| SEQ ID NO: 3164 | VH | E-H.32 | EVQLVESGGALVKPGGSLRLSCAASGYAFSSSWMN |
| | | | WVRQAPGKGLEWIGRIYPGDGDTKYNGKFKGRATL |
| | | | SADKSKSTAYLQMNSLKTEDTAVYYCARRGTGGWY |
| | | | FDVWGQGTTVTVSS |
| SEQ ID NO: 3165 | VH | E-H.33 | QVQLQESGPGLVKPSQTLSLTCAAYGYAFSSSWMN |
| | | | WVRQPPGKGLEWIGRIYPGDGDTKYNGKFKGRATL |
| | | | SADKSKSQASLKLSSVTAADTAVYYCARRGTGGWY |
| | | | FDVWGQGTTVTVSS |
| SEQ ID NO: 3166 | VH | E-H.34 | QVQLQESGSGLVKPSQTLSLTCAASGYAFSSSWMN |
| | | | WVRQPPGKGLEWIGRIYPGDGDTKYNGKFKGRATL |
| | | | SADKSKSQASLKLSSVTAADTAVYYCARRGTGGWY |
| | | | FDVWGQGTTVTVSS |
| SEQ ID NO: 3167 | VH | E-H.35 | EVQLVESGGGLVQPGGSLRLSCAASGYAFSSSWMN |
| | | | WVRQAPGKGLEWIGRIYPGDGDTKYNGKFKGRATL |
| | | | SADKSKSSAYLQMNSLKTEDTAVYYCARRGTGGWY |
| | | | FDVWGQGTTVTVSS |
| SEQ ID NO: 3168 | VH | E-H.36 | QVQLQESGPGLVKPSDTLSLTCTASGYAFSSSWMN |
| | | | WVRQPPGKGLEWIGRIYPGDGDTKYNGKFKGRATL |
| | | | SADKSKSQASLKLSSVTAADTAVYYCARRGTGGWY |
| | | | FDVWGQGTTVTVSS |
| SEQ ID NO: 3169 | VH | E-H.37 | QVQLQESGPGLVKPSQTLSLTCTASGYAFSSSWMN |
| | | | WVRQHPGKGLEWIGRIYPGDGDTKYNGKFKGRATL |
| | | | SADKSKSQASLKLSSVTAADTAVYYCARRGTGGWY |
| | | | FDVWGQGTTVTVSS |
| SEQ ID NO: 3170 | VH | E-H.38 | QVQLQESGPGLVKPSQTLSLTCTASGYAFSSSWMN |
| | | | WVRQHPGKGLEWIGRIYPGDGDTKYNGKFKGLATL |
| | | | SADKSKSQASLKLSSVTAADTAVYYCARRGTGGWY |
| | | | FDVWGWGTTVTVSS |
| SEQ ID NO: 3171 | VH | E-H.39 | QVQLVESGGGVVQPGRSLRLSCAASGYAFSSSWMN |
| | | | WVRQAPGKGLEWIGRIYPGDGDTKYNGKFKGRATL |
| | | | SADKSKSTAYLQMSSLRAEDTAVYYCARRGTGGWY |
| | | | FDVWGQGTTVTVSS |
| SEQ ID NO: 3172 | VH | E-H.40 | QVQLVESGGGLVKPGGSLRLSCAASGYAFSSSWMN |
| | | | WVRQAPGKGLEWIGRIYPGDGDTKYNGKFKGRATL |
| | | | SADKAKSSAYLQMNSLRAEDTAVYYCARRGTGGWY |
| | | | FDVWGQGTTVTVSS |
| SEQ ID NO: 3173 | VH | E-H.41 | QVQLVESGGGLVQPGGSLRLSCSASGYAFSSSWMN |
| | | | WVRQAPGKGLEWIGRIYPGDGDTKYNGKFKGRATL |
| | | | SADKSKSTAYLQMNSLRAEDTAVYYCARRGTGGWY |
| | | | FDVWGQGTTVTVSS |
| SEQ ID NO: 3174 | VH | E-H.42 | QVQLLESGGGLVKPGGSLRLSCAASGYAFSSSWMN |
| | | | WVRQAPGKGLEWIGRIYPGDGDTKYNGKFKGRATL |
| | | | SADKAKSSAYLQMNSLRAEDTAVYYCARRGTGGWY |
| | | | FDVWGQGTTVTVSS |
| SEQ ID NO: 3175 | VH | E-H.43 | EVQLVESGGGLVQPGGSLRLSCSASGYAFSSSWMN |
| | | | WVRQAPGKGLEWIGRIYPGDGDTKYNGKFKGRATL |
| | | | SADKSKSTAYLQMSSLRAEDTAVYYCARRGTGGWY |
| | | | FDVWGQGTTVTVSS |
| SEQ ID NO: 3176 | VH | E-H.44 | QVQLQESGPGLVKPSDTLSLTCAASGYAFSSSWMN |
| | | | WVRQPPGKGLEWIGRIYPGDGDTKYNGKFKGRATL |
| | | | SADKSKSQASLKLSSVTAVDTAVYYCARRGTGGWY |
| | | | FDVWGQGTTVTVSS |
| SEQ ID NO: 3177 | VH | E-H.45 | QVQLQESGPGLVKPSQTLSLTCAASGYAFSSSWMN |
| | | | WVRQPPGKGLEWIGRIYPGDGDTKYNGKFKGRATL |
| | | | SADKSKSQASLKLSSVTAVDTAVYYCARRGTGGWY |
| | | | FDVWGQGTTVTVSS |
| SEQ ID NO: 3178 | VH | E-H.46 | EVQLVESGGGLVQPGGSLRLSCSASGYAFSSSWMN |
| | | | WVRQAPGKGLEWIGRIYPGDGDTKYNGKFKGRATL |
| | | | SADKSKSTAYVQMSSLRAEDTAVYYCARRGTGGWY |
| | | | FDVWGQGTTVTVSS |
| SEQ ID NO: 3179 | VH | E-H.47 | QVQLVDSGGGVVQPGRSLRLSCAASGYAFSSSWMN |
| | | | WVRQAPGKGLEWIGRIYPGDGDTKYNGKFKGRATL |
| | | | SADKSKSTAYLQMNSLRAEDTAVYYCARRGTGGWY |
| | | | FDVWGQGTTVTVSS |
| SEQ ID NO: 3180 | VH | E-H.48 | QVQLVESGGGVVQPGRSLRLSCAASGYAFSSSWMN |
| | | | WVRQAPGKGLEWIGRIYPGDGDTKYNGKFKGRATL |
| | | | SADKSKSTAYLQMNSLRAEGTAVYYCARRGTGGWY |
| | | | FDVWGQGTTVTVSS |
| SEQ ID NO: 3181 | VH | E-H.49 | QVQLVESGGGVVQPGRSLRLSCAASGYAFSSSWMN |
| | | | WVRQAPGKGLEWIGRIYPGDGDTKYNGKFKGRATL |
| | | | SADKSKSTAYLQMNSLRAEDTAVYYCARRGTGGWY |
| | | | FDVWGQGTTVTVSS |
| SEQ ID NO: 3182 | VH | E-H.50 | EVQLVESGGGLVQPGGSLRLSCAASGYAFSSSWMN |
| | | | WVRQAPGKGLEWIGRIYPGDGDTKYNGKFKGRATL |
| | | | SADKSKSTAYLQMNSLRAEDTAVYYCARRGTGGWY |
| | | | FDVWGQGTTVTVSS |

[0744] In some embodiments, the anti-TCRβ V5 antibody molecule comprises a VH and/or a VL of an antibody described in Table 10A, or a sequence with at least 80%, 85%, 90%, 95%, 96%, 97%, 98%, 99% or more identity thereto.

[0745] In some embodiments, the anti-TCRβ V5 antibody molecule comprises a VH and a VL of an antibody described in Table 10A, or a sequence with at least 80%, 85%, 90%, 95%, 96%, 97%, 98%, 99% or more identity thereto.

[0746] In some embodiments, the anti-TCRβ V5 antibody molecule comprises a VH and/or a VL of an antibody described in Table 11A, or a sequence with at least 80%, 85%, 90%, 95%, 96%, 97%, 98%, 99% or more identity thereto.

[0747] In some embodiments, the anti-TCRβ V5 antibody molecule comprises a VH and a VL of an antibody described in Table 11A, or a sequence with at least 80%, 85%, 90%, 95%, 96%, 97%, 98%, 99% or more identity thereto.

### Anti-TCRβ V10 Antibodies

[0748] Accordingly, in one aspect, the disclosure provides an anti-TCRβV antibody molecule that binds to a human TCRβ V10 subfamily member. In some embodiments, TCRβ V10 subfamily is also known as TCRβ V12. In some embodiments, the TCRβ V10 subfamily comprises: TCRβ V10-1*01, TCRβ V10-1*02, TCRβ V10-3*01 or TCRβ V10-2*01, or a variant thereof.

[0749] Exemplary anti-TCRβ V10 antibodies of the disclosure are provided in Table 12A. In some embodiments, the anti-TCRβ V10 is antibody D, e.g., humanized antibody D (antibody D-H), as provided in Table 12A. In some embodiments, antibody D comprises one or more (e.g., three) light chain CDRs and/or one or more (e.g., three) heavy chain CDRs provided in Table 12A, or a sequence with at least 95% identity thereto. In some embodiments, antibody D comprises a variable heavy chain (VH) and/or a variable light chain (VL) provided in Table 12A, or a sequence with at least 95% identity thereto.

TABLE 12A
Amino acid sequences for anti TCRf3 V10 antibodies
Amino acid and nucleotide sequences for murine and humanized antibody
molecules which bind to TCRBV 10 (e.g., TCRBV 10-1, TCRBV 10-2 or TCRBV 10-3).
The amino acid the heavy and light chain CDRs, and the amino acid and
nucleotide sequences of the heavy and light chain
variable regions, and the heavy and light chains are shown.
Murine antibody D

| | | |
|---|---|---|
| SEQ ID NO: 1288 | HC CDR1 (Kabat) | SYGMS |
| SEQ ID NO: 1289 | HC CDR2 (Kabat) | LISSGGSYTYYTDSVKG |
| SEQ ID NO: 1290 | HC CDR3 (Kabat) | HGGNFFDY |
| SEQ ID NO: 1291 | HC CDR1 (Chothia) | GFTFRSY |
| SEQ ID NO: 1292 | HC CDR2 (Chothia) | SSGGSY |
| SEQ ID NO: 1290 | HC CDR3 (Chothia) | HGGNFFDY |
| SEQ ID NO: 1293 | HC CDR1 (Combined) | GFTFRSYGMS |
| SEQ ID NO: 1289 | HC CDR2 (Combined) | LISSGGSYTYYTDSVKG |
| SEQ ID NO: 1290 | HC CDR3 (Combined) | HGGNFFDY |
| SEQ ID NO: 1294 | LC CDR1 (Kabat) | SVSSSVSYMH |
| SEQ ID NO: 1295 | LC CDR2 (Kabat) | DTSKLAS |
| SEQ ID NO: 1296 | LC CDR3 (Kabat) | QQWSSNPQYT |
| SEQ ID NO: 1297 | LC CDR1 (Chothia) | SSSVSY |
| SEQ ID NO: 1295 | LC CDR2 (Chothia) | DTSKLAS |
| SEQ ID NO: 1296 | LC CDR3 (Chothia) | QQWSSNPQYT |
| SEQ ID NO: 1294 | LC CDR1 (Combined) | SVSSSVSYMH |
| SEQ ID NO: 1295 | LC CDR2 (Combined) | DTSKLAS |
| SEQ ID NO: 1296 | LC CDR3 (Combined) | QQWSSNPQYT |
| SEQ ID NO: 3183 | VH | EVQLVESGGDLVKPGGSLKLSCAVSGFTFRSYG |
| | | MSWVRQTPDKRLEWVALISSGGSYTYYTDSVKG |
| | | RFTISRDNAKNTLYLQMSSLKSEDTAIYYCSRHG |
| | | GNFFDYWGQGTTLTVSS |
| SEQ ID NO: 3184 | VL | QIVLTQSPSIMSASPGEKVTMTCSVSSSVSYMHW |
| | | YQQKSGTSPKRWIYDTSKLASGVPARFSGSGSGT |
| | | SYSLTISSMEAEDAATYYCQQWSSNPQYTFGGG |
| | | TKLEIK |

Humanized antibody D (D-H antibody)
Variable light chain (VL)

| | | | |
|---|---|---|---|
| SEQ ID NO: 3185 | VL | D-VL-H.1 | DIVLTQSPAFLSVTPGEKVTITCSVSSSVSYMHW |
| | | | YQQKPDQAPKLLIYDTSKLASGVPSRFSGSGSGT |
| | | | DYTFTISSLEAEDAATYYCQQWSSNPQYTFGQGT |
| | | | KLEIK |
| SEQ ID NO: 3186 | VL | D-VL-H.2 | AIQLTQSPSSLSASVGDRVTITCSVSSSVSYMHW |
| | | | YQQKPGKAPKLLIYDTSKLASGVPSRFSGSGSGT |
| | | | DYTLTISSLQPEDFATYYCQQWSSNPQYTFGQGT |
| | | | KLEIK |
| SEQ ID NO: 3187 | VL | D-VL-H.3 | DIQLTQSPSFLSASVGDRVTITCSVSSSVSYMHW |
| | | | YQQKPGKAPKLLIYDTSKLASGVPSRFSGSGSGT |
| | | | EYTLTISSLQPEDFATYYCQQWSSNPQYTFGQGT |
| | | | KLEIK |
| SEQ ID NO: 3188 | VL | D-VL-H.4 | DIQLTQSPSSLSASVGDRVTITCSVSSSVSYMHW |
| | | | YQQKPGKAPKLLIYDTSKLASGVPSRFSGSGSGT |
| | | | DYTLTISSLQPEDFATYYCQQWSSNPQYTFGQGT |
| | | | KLEIK |
| SEQ ID NO: 3189 | VL | D-VL-H.5 | DIQLTQSPSSVSASVGDRVTITCSVSSSVSYMHW |
| | | | YQQKPGKAPKLLIYDTSKLASGVPSRFSGSGSGT |
| | | | DYTLTISSLQPEDFATYYCQQWSSNPQYTFGQGT |
| | | | KLEIK |
| SEQ ID NO: 3190 | VL | D-VL-H.6 | DIQLTQSPSSLSASVGDRVTITCSVSSSVSYMHW |
| | | | YQQKPGKVPKLLIYDTSKLASGVPSRFSGSGSGT |
| | | | DYTLTISSLQPEDVATYYCQQWSSNPQYTFGQGT |
| | | | KLEIK |
| SEQ ID NO: 3191 | VL | D-VL-H.7 | DIQLTQSPSSLSASVGDRVTITCSVSSSVSYMHW |
| | | | YQQKPGQAPKLLIYDTSKLASGVPSRFSGSGSGT |
| | | | DYTLTISSLQPEDVATYYCQQWSSNPQYTFGQGT |
| | | | KLEIK |
| SEQ ID NO: 3192 | VL | D-VL-H.8 | EIVLTQSPDFQSVTPKEKVTITCSVSSSVSYMHW |
| | | | YQQKPDQSPKLLIYDTSKLASGVPSRFSGSGSGT |
| | | | DYTLTINSLEAEDAATYYCQQWSSNPQYTFGQG |
| | | | TKLEIK |
| SEQ ID NO: 3193 | VL | D-VL-H.9 | AIRLTQSPFSLSASVGDRVTITCSVSSSVSYMHW |
| | | | YQQKPAKAPKLFIYDTSKLASGVPSRFSGSGSGT |
| | | | DYTLTISSLQPEDFATYYCQQWSSNPQYTFGQGT |
| | | | KLEIK |
| SEQ ID NO: 3194 | VL | D-VL-H.10 | DIQLTQSPSSLSASVGDRVTITCSVSSSVSYMHW |
| | | | YQQKPGKAPKLLIYDTSKLASGVPSRFSGSGSGT |
| | | | DYTFTISSLQPEDIATYYCQQWSSNPQYTFGQGT |
| | | | KLEIK |
| SEQ ID NO: 3195 | VL | D-VL-H.11 | EIVLTQSPATLSLSPGERATLSCSVSSSVSYMHW |
| | | | YQQKPGQAPKLLIYDTSKLASGIPARFSGSGSGT |
| | | | DYTLTISSLEPEDFAVYYCQQWSSNPQYTFGQGT |
| | | | KLEIK |
| SEQ ID NO: 3196 | VL | D-VL-H.12 | DIQLTQSPSTLSASVGDRVTITCSVSSSVSYMHW |
| | | | YQQKPGKAPKLLIYDTSKLASGVPSRFSGSGSGT |
| | | | EYTLTISSLQPDDFATYYCQQWSSNPQYTFGQGT |
| | | | KLEIK |
| SEQ ID NO: 3197 | VL | D-VL-H.13 | DIQLTQSPSSLSASVGDRVTITCSVSSSVSYMHW |
| | | | YQQKPGKTPKLLIYDTSKLASGIPSRFSGSGSGTD |
| | | | YTLTIRSLQPEDFATYYCQQWSSNPQYTFGQGTK |
| | | | LEIK |
| SEQ ID NO: 3198 | VL | D-VL-H.14 | EIVLTQSPPTLSLSPGERVTLSCSVSSSVSYMHWY |
| | | | QQKPGQAPKLLIYDTSKLASGIPARFSGSGSGTD |
| | | | YTLTISSLQPEDFAVYYCQQWSSNPQYTFGQGTK |
| | | | LEIK |
| SEQ ID NO: 3199 | VL | D-VL-H.15 | DIQLTQSPSSLSASVGDRVTITCSVSSSVSYMHW |
| | | | YQQKPGKAPKRLIYDTSKLASGVPSRFSGSGSGT |
| | | | EYTLTISSLQPEDFATYYCQQWSSNPQYTFGQGT |
| | | | KLEIK |
| SEQ ID NO: 3200 | VL | D-VL-H.16 | EIVLTQSPATLSLSPGERATLSCSVSSSVSYMHW |
| | | | YQQKPGQAPKLLIYDTSKLASGIPARFSGSGPGT |
| | | | DYTLTISSLEPEDFAVYYCQQWSSNPQYTFGQGT |
| | | | KLEIK |
| SEQ ID NO: 3201 | VL | D-VL-H.17 | EIVLTQSPATLSLSPGERATLSCSVSSSVSYMHW |
| | | | YQQKPGQAPKLLIYDTSKLASGIPARFSGSGSGT |
| | | | DYTLTISRLEPEDFAVYYCQQWSSNPQYTFGQGT |
| | | | KLEIK |
| SEQ ID NO: 3202 | VL | D-VL-H.18 | EIVLTQSPATLSLSPGERATLSCSVSSSVSYMHW |
| | | | YQQKPGQAPKLLIYDTSKLASGIPARFSGSGSGT |
| | | | DYTLTISSLQPEDFAVYYCQQWSSNPQYTFGQGT |
| | | | KLEIK |
| SEQ ID NO: 3203 | VL | D-VL-H.19 | EIVLTQSPATLSVSPGERATLSCSVSSSVSYMHW |
| | | | YQQKPGQAPKLLIYDTSKLASGIPARFSGSGSGTE |
| | | | YTLTISSLQSEDFAVYYCQQWSSNPQYTFGQGTK |
| | | | LEIK |
| SEQ ID NO: 3204 | VL | D-VL-H.20 | EIVLTQSPATLSVSPGERATLSCSVSSSVSYMHW |
| | | | YQQKPGQAPKLLIYDTSKLASGIPARFSGSGSGTE |
| | | | YTLTISILQSEDFAVYYCQQWSSNPQYTFGQGTK |
| | | | LEIK |
| SEQ ID NO: 3205 | VL | D-VL-H.21 | EIVLTQSPPTLSLSPGERVTLSCSVSSSVSYMHWY |
| | | | QQKPGQAPKLLIYDTSKLASSIPARFSGSGSGTDY |
| | | | TLTISSLQPEDFAVYYCQQWSSNPQYTFGQGTKL |
| | | | EIK |
| SEQ ID NO: 3206 | VL | D-VL-H.22 | DIQLTQSPSSLSASVGDRVTITCSVSSSVSYMHW |
| | | | YQQKPGKAPKSLIYDTSKLASGVPSRFSGSGSGT |
| | | | DYTLTISSLQPEDFATYYCQQWSSNPQYTFGQGT |
| | | | KLEIK |
| SEQ ID NO: 3207 | VL | D-VL-H.23 | DIQLTQSPSSLSASVGDRVTITCSVSSSVSYMHW |
| | | | YQQKPGKAPKRLIYDTSKLASGVPSRFSGSGSGT |
| | | | EYTLTISNLQPEDFATYYCQQWSSNPQYTFGQGT |
| | | | KLEIK |
| SEQ ID NO: 3208 | VL | D-VL-H.24 | DIQLTQSPSAMSASVGDRVTITCSVSSSVSYMHW |
| | | | YQQKPGKVPKRLIYDTSKLASGVPSRFSGSGSGT |
| | | | EYTLTISSLQPEDFATYYCQQWSSNPQYTFGQGT |
| | | | KLEIK |
| SEQ ID NO: 3209 | VL | D-VL-H.25 | EIVLTQSPATLSLSPGERATLSCSVSSSVSYMHW |
| | | | YQQKPGQAPKLLIYDTSKLASGIPDRFSGSGSGT |
| | | | DYTLTISRLEPEDFAVYYCQQWSSNPQYTFGQGT |
| | | | KLEIK |
| SEQ ID NO: 3210 | VL | D-VL-H.26 | EIVLTQSPATLSLSPGERATLSCSVSSSVSYMHW |
| | | | YQQKPGLAPKLLIYDTSKLASGIPDRFSGSGSGTD |
| | | | YTLTISRLEPEDFAVYYCQQWSSNPQYTFGQGTK |
| | | | LEIK |
| SEQ ID NO: 3211 | VL | D-VL-H.27 | EIVLTQSPGTLSLSPGERATLSCSVSSSVSYMHW |
| | | | YQQKPGQAPKLLIYDTSKLASGIPDRFSGSGSGT |
| | | | DYTLTISRLEPEDFAVYYCQQWSSNPQYTFGQGT |
| | | | KLEIK |
| SEQ ID NO: 3212 | VL | D-VL-H.28 | DIQLTQSPSSLSASVGDRVTITCSVSSSVSYMHW |
| | | | YQQKPGKAPKSLIYDTSKLASGVPSKFSGSGSGT |
| | | | DYTLTISSLQPEDFATYYCQQWSSNPQYTFGQGT |
| | | | KLEIK |
| SEQ ID NO: 3213 | VL | D-VL-H.29 | DIQLTQSPSSLSASVGDRVTITCSVSSSVSYMHW |
| | | | YQQKPEKAPKSLIYDTSKLASGVPSRFSGSGSGT |
| | | | DYTLTISSLQPEDFATYYCQQWSSNPQYTFGQGT |
| | | | KLEIK |
| SEQ ID NO: 3214 | VL | D-VL-H.30 | DIVLTQSPDSLAVSLGERATINCSVSSSVSYMHW |
| | | | YQQKPGQPPKLLIYDTSKLASGVPDRFSGSGSGT |
| | | | DYTLTISSLQAEDVAVYYCQQWSSNPQYTFGQG |
| | | | TKLEIK |
| SEQ ID NO: 3215 | VL | D-VL-H.31 | EIVLTQTPLSLSITPGEQASMSCSVSSSVSYMHWY |
| | | | LQKARPVPKLLIYDTSKLASGVPDRFSGSGSGTD |
| | | | YTLKISRVEAEDFGVYYCQQWSSNPQYTFGQGT |
| | | | KLEIK |
| SEQ ID NO: 3216 | VL | D-VL-H.32 | EIVLTQTPLSLSITPGEQASISCSVSSSVSYMHWY |
| | | | LQKARPVPKLLIYDTSKLASGVPDRFSGSGSGTD |
| | | | YTLKISRVEAEDFGVYYCQQWSSNPQYTFGQGT |
| | | | KLEIK |
| SEQ ID NO: 3217 | VL | D-VL-H.33 | DIVLTQSPLSLPVTPGEPASISCSVSSSVSYMHWY |
| | | | LQKPGQSPKLLIYDTSKLASGVPDRFSGSGSGTD |
| | | | YTLKISRVEAEDVGVYYCQQWSSNPQYTFGQGT |
| | | | KLEIK |
| SEQ ID NO: 3218 | VL | D-VL-H.34 | DIVLTQSPLSLPVTLGQPASISCSVSSSVSYMHWY |
| | | | QQRPGQSPKRLIYDTSKLASGVPDRFSGSGSGTD |
| | | | YTLKISRVEAEDVGVYYCQQWSSNPQYTFGQGT |
| | | | KLEIK |
| SEQ ID NO: 3219 | VL | D-VL-H.35 | DIVLTQTPLSLPVTPGEPASISCSVSSSVSYMHWY |
| | | | LQKPGQSPKLLIYDTSKLASGVPDRFSGSGSGTD |
| | | | YTLKISRVEAEDVGVYYCQQWSSNPQYTFGQGT |
| | | | KLEIK |
| SEQ ID NO: 3220 | VL | D-VL-H.36 | DIVLTQTPLSLSVTPGQPASISCSVSSSVSYMHWY |
| | | | LQKPGQSPKLLIYDTSKLASGVPDRFSGSGSGTD |
| | | | YTLKISRVEAEDVGVYYCQQWSSNPQYTFGQGT |
| | | | KLEIK |
| SEQ ID NO: 3221 | VL | D-VL-H.37 | DIVLTQTPLSLSVTPGQPASISCSVSSSVSYMHWY |
| | | | LQKPGQPPKLLIYDTSKLASGVPDRFSGSGSGTD |
| | | | YTLKISRVEAEDVGVYYCQQWSSNPQYTFGQGT |
| | | | KLEIK |
| SEQ ID NO: 3222 | VL | D-VL-H.38 | DIQLIQSPSFLSASVGDRVSIICSVSSSVSYMHWY |
| | | | LQKPGKSPKLFIYDTSKLASGVSSRFSGRGSGTD |
| | | | YTLTIISLKPEDFAAYYCQQWSSNPQYTFGQGTK |
| | | | LEIK |
| SEQ ID NO: 3223 | VL | D-VL-H.39 | DIVLTQTPLSSPVTLGQPASISCSVSSSVSYMHWY |
| | | | QQRPGQPPKLLIYDTSKLASGVPDRFSGSGAGTD |
| | | | YTLKISRVEAEDVGVYYCQQWSSNPQYTFGQGT |
| | | | KLEIK |
| SEQ ID NO: 3224 | VL | D-VL-H.40 | EITLTQSPAFMSATPGDKVNISCSVSSSVSYMHW |
| | | | YQQKPGEAPKFIIYDTSKLASGIPPRFSGSGYGTD |
| | | | YTLTINNIESEDAAYYYCQQWSSNPQYTFGQGT |
| | | | KLEIK |

Variable HEAVY chain (VH)

| | | | |
|---|---|---|---|
| SEQ ID NO: 3225 | VH | D-VH-H.1 | EVQLVESGGGLVKPGGSLRLSCAVSGFTFRSYG |
| | | | MSWVRQAPGKGLEWVALISSGGSYTYYTDSVK |
| | | | GRFTISRDNSKNTLYLQMNSLKTEDTAVYYCSR |
| | | | HGGNFFDYWGQGTTVTVSS |
| SEQ ID NO: 3226 | VH | D-VH-H.2 | EVQLVESGGALVKPGGSLRLSCAVSGFTFRSYG |
| | | | MSWVRQAPGKGLEWVALISSGGSYTYYTDSVK |
| | | | GRFTISRDNSKNTLYLQMNSLKTEDTAVYYCSR |
| | | | HGGNFFDYWGQGTTVTVSS |
| SEQ ID NO: 3227 | VH | D-VH-H.3 | EVQLVESGGGLVQPGGSLRLSCAVSGFTFRSYG |
| | | | MSWVRQAPGKGLEWVALISSGGSYTYYTDSVK |
| | | | GRFTISRDNAKNTLYLQMNSLRAEDTAVYYCSR |
| | | | HGGNFFDYWGQGTTVTVSS |
| SEQ ID NO: 3228 | VH | D-VH-H.4 | EVQLVESGGGLVQPGGSLRLSCAVSGFTFRSYG |
| | | | MSWVRQAPGKGLEWVALISSGGSYTYYTDSVK |
| | | | GRFTISRDNAKNSLYLQMNSLRAEDTAVYYCSR |
| | | | HGGNFFDYWGQGTTVTVSS |
| SEQ ID NO: 3229 | VH | D-VH-H.5 | EVQLVESGGGLVQPGGSLRLSCAVSGFTFRSYG |
| | | | MSWVRQAPGKGLEWVALISSGGSYTYYTDSVK |
| | | | GRFTISRDNSKNSLYLQMNSLKTEDTAVYYCSR |
| | | | HGGNFFDYWGQGTTVTVSS |
| SEQ ID NO: 3230 | VH | D-VH-H.6 | EVQLVESGGGLVQPGGSLRLSCAVSGFTFRSYG |
| | | | MSWVRQAPGKGLEWVALISSGGSYTYYTDSVK |
| | | | GRFTISRDNAKNSLYLQMNSLRAEDMAVYYCSR |
| | | | HGGNFFDYWGQGTTVTVSS |
| SEQ ID NO: 3231 | VH | D-VH-H.7 | EVQLVESGGGLVQPGGSLRLSCAVSGFTFRSYG |
| | | | MSWVRQAPGKGLEWVALISSGGSYTYYTDSVK |
| | | | GQFTISRDNAKNTLYLQMNSLRAEDMAVYYCSR |
| | | | HGGNFFDYWGQGTTVTVSS |
| SEQ ID NO: 3232 | VH | D-VH-H.8 | EVQLVESGGGLVKPGRSLRLSCTVSGFTFRSYGM |
| | | | SWVRQAPGKGLEWVALISSGGSYTYYTDSVKGR |
| | | | FTISRDNSKNILYLQMNSLKTEDTAVYYCSRHGG |
| | | | NFFDYWGQGTTVTVSS |
| SEQ ID NO: 3233 | VH | D-VH-H.9 | EVQLVESGGGLVKPGGSLRLSCAVSGFTFRSYG |
| | | | MSWVRQAPGKGLEWVALISSGGSYTYYTDSVK |
| | | | GRFTISRDNAKNSLYLQMNSLRAEDTAVYYCSR |
| | | | HGGNFFDYWGQGTTVTVSS |
| SEQ ID NO: 3234 | VH | D-VH-H.10 | EVQLVESGGGLVQPGGSLKLSCAVSGFTFRSYG |
| | | | MSWVRQASGKGLEWVALISSGGSYTYYTDSVK |
| | | | GRFTISRDNSKNTLYLQMNSLKTEDTAVYYCSR |
| | | | HGGNFFDYWGQGTTVTVSS |
| SEQ ID NO: 3235 | VH | D-VH-H.11 | QVQLVESGGGVVQPGGSLRLSCAVSGFTFRSYG |
| | | | MSWVRQAPGKGLEWVALISSGGSYTYYTDSVK |
| | | | GRFTISRDNSKNTLYLQMNSLRAEDTAVYYCSR |
| | | | HGGNFFDYWGQGTTVTVSS |
| SEQ ID NO: 3236 | VH | D-VH-H.12 | QVQLVESGGGVVQPGRSLRLSCAVSGFTFRSYG |
| | | | MSWVRQAPGKGLEWVALISSGGSYTYYTDSVK |
| | | | GRFTISRDNSKNTLYLQMSSLRAEDTAVYYCSRH |
| | | | GGNFFDYWGQGTTVTVSS |
| SEQ ID NO: 3237 | VH | D-VH-H.13 | EVQLVESGGGLVQPGGSLRLSCPVSGFTFRSYGM |
| | | | SWVRQAPGKGLEWVALISSGGSYTYYTDSVKGR |
| | | | FTISRDNANNSLYLQMNSLRAEDTAVYYCSRHG |
| | | | GNFFDYWGQGTTVTVSS |
| SEQ ID NO: 3238 | VH | D-VH-H.14 | EVQLVESGGGLVQPGRSLRLSCTVSGFTFRSYGM |
| | | | SWVRQAPGKGLEWVALISSGGSYTYYTDSVKGR |
| | | | FTISRDNSKNILYLQMNSLKTEDTAVYYCSRHGG |
| | | | NFFDYWGQGTTVTVSS |
| SEQ ID NO: 3239 | VH | D-VH-H.15 | EVQLVESGGGLVQPGPSLRLSCTVSGFTFRSYGM |
| | | | SWVRQAPGKGLEWVALISSGGSYTYYTDSVKGR |
| | | | FTISRDNSKNILYLQMNSLKTEDTAVYYCSRHGG |
| | | | NFFDYWGQGTTVTVSS |
| SEQ ID NO: 3240 | VH | D-VH-H.16 | EVQLVESGGGLVQPGGSLRLSCAVSGFTFRSYG |
| | | | MSWVRQAPGKGLEWVALISSGGSYTYYTDSVK |
| | | | GRFTISRDNSKNTLYLQMNSLRAEDTAVYYCSR |
| | | | HGGNFFDYWGQGTTVTVSS |
| SEQ ID NO: 3241 | VH | D-VH-H.17 | EVQLVESGGGLVQPGGSLRLSCAVSGFTFRSYG |
| | | | MSWVRQAPGKGLEWVALISSGGSYTYYTDSVK |
| | | | GRFTISRDNAKNSLYLQMNSLRDEDTAVYYCSR |
| | | | HGGNFFDYWGQGTTVTVSS |
| SEQ ID NO: 3242 | VH | D-VH-H.18 | QVQLVESGGGLVKPGGSLRLSCAVSGFTFRSYG |
| | | | MSWVRQAPGKGLEWVALISSGGSYTYYTDSVK |
| | | | GRFTISRDNAKNSLYLQMNSLRAEDTAVYYCSR |
| | | | HGGNFFDYWGQGTTVTVSS |
| SEQ ID NO: 3243 | VH | D-VH-H.19 | QVQLVESGGGVVQPGRSLRLSCAVSGFTFRSYG |
| | | | MSWVRQAPGKGLEWVALISSGGSYTYYTDSVK |
| | | | GRFTISRDNSKNTLYLQMNSLRAEDTAVYYCSR |
| | | | HGGNFFDYWGQGTTVTVSS |
| SEQ ID NO: 3244 | VH | D-VH-H.20 | EVQLLESGGGLVQPGGSLRLSCAVSGFTFRSYG |
| | | | MSWVRQAPGKGLEWVALISSGGSYTYYTDSVK |
| | | | GRFTISRDNSKNTLYLQMNSLRAEDTAVYYCSR |
| | | | HGGNFFDYWGQGTTVTVSS |
| SEQ ID NO: 3245 | VH | D-VH-H.21 | EVQLVESGGGLVQPGGSLRLSCAVSGFTFRSYG |
| | | | MSWVRQAPGKGLEWVALISSGGSYTYYTDSVK |
| | | | GRFTISRHNSKNTLYLQMNSLRAEDTAVYYCSR |
| | | | HGGNFFDYWGQGTTVTVSS |
| SEQ ID NO: 3246 | VH | D-VH-H.22 | EVQLVESGGGLIQPGGSLRLSCAVSGFTFRSYGM |
| | | | SWVRQPPGKGLEWVALISSGGSYTYYTDSVKGR |
| | | | FTISRDNSKNTLYLQMNSLRAEDTAVYYCSRHG |
| | | | GNFFDYWGQGTTVTVSS |
| SEQ ID NO: 3247 | VH | D-VH-H.23 | EVQLVESGGGLIQPGGSLRLSCAVSGFTFRSYGM |
| | | | SWVRQAPGKGLEWVALISSGGSYTYYTDSVKGR |
| | | | FTISRDNSKNTLYLQMNSLRAEDTAVYYCSRHG |
| | | | GNFFDYWGQGTTVTVSS |
| SEQ ID NO: 3248 | VH | D-VH-H.24 | EVQLVESGGGLVQPGRSLRLSCAVSGFTFRSYG |
| | | | MSWVRQAPGKGLEWVALISSGGSYTYYTDSVK |
| | | | GRFTISRDNAKNSLYLQMNSLRAEDTALYYCSR |
| | | | HGGNFFDYWGQGTTVTVSS |
| SEQ ID NO: 3249 | VH | D-VH-H.25 | QVQLVESGGGVVQPGRSLRLSCAVSGFTFRSYG |
| | | | MSWVRQAPGKGLEWVALISSGGSYTYYTDSVK |
| | | | GRFTISRDNSKNRLYLQMNSLRAEDTAVYYCSR |
| | | | HGGNFFDYWGQGTTVTVSS |
| SEQ ID NO: 3250 | VH | D-VH-H.26 | QVQLVESGGGVVQPGRSLRLSCAVSGFTFRSYG |
| | | | MSWVRQAPGKGLEWVALISSGGSYTYYTDSVK |
| | | | GRFTISRDNSKNTLYLQMNSLRAEGTAVYYCSR |
| | | | HGGNFFDYWGQGTTVTVSS |
| SEQ ID NO: 3251 | VH | D-VH-H.27 | QVQLVESGGGVVQPGRSLRLSCAVSGFTFRSYG |
| | | | MSWVRQAPGKGLEWVALISSGGSYTYYTDSVK |
| | | | GRFAISRDNSKNTLYLQMNSLRAEDTAVYYCSR |
| | | | HGGNFFDYWGQGTTVTVSS |
| SEQ ID NO: 3252 | VH | D-VH-H.28 | QVQLVDSGGGVVQPGRSLRLSCAVSGFTFRSYG |
| | | | MSWVRQAPGKGLEWVALISSGGSYTYYTDSVK |
| | | | GRFTISRDNSKNTLYLQMNSLRAEDTAVYYCSR |
| | | | HGGNFFDYWGQGTTVTVSS |
| SEQ ID NO: 3253 | VH | D-VH-H.29 | EVQLVESGGGVVRPGGSLRLSCAVSGFTFRSYG |
| | | | MSWVRQAPGKGLEWVALISSGGSYTYYTDSVK |
| | | | GRFTISRDNAKNSLYLQMNSLRAEDTALYHCSR |
| | | | HGGNFFDYWGQGTTVTVSS |
| SEQ ID NO: 3254 | VH | D-VH-H.30 | EVQLVESGGVVVQPGGSLRLSCAVSGFTFRSYG |
| | | | MSWVRQAPGKGLEWVALISSGGSYTYYTDSVK |
| | | | GRFTISRDNSKNSLYLQMNSLRAEDTALYYCSRH |
| | | | GGNFFDYWGQGTTVTVSS |
| SEQ ID NO: 3255 | VH | D-VH-H.31 | EVQLVESGGGVVQPGGSLRLSCAVSGFTFRSYG |
| | | | MSWVRQAPGKGLEWVALISSGGSYTYYTDSVK |
| | | | GRFTISRDNSKNSLYLQMNSLRTEDTALYYCSRH |
| | | | GGNFFDYWGQGTTVTVSS |
| SEQ ID NO: 3256 | VH | D-VH-H.32 | EVQLVESGGVVVQPGGSLRLSCAVSGFTFRSYG |
| | | | MSWVRQAPGKGLEWVALISSGGSYTYYTDSVK |
| | | | GRFTISRDNSKNSLYLQMNSLRTEDTALYYCSRH |
| | | | GGNFFDYWGQGTTVTVSS |
| SEQ ID NO: 3257 | VH | D-VH-H.33 | EVQLVETGGGLIQPGGSLRLSCAVSGFTFRSYGM |
| | | | SWVRQAPGKGLEWVALISSGGSYTYYTDSVKGR |
| | | | FTISRDNSKNTLYLQMNSLRAEDTAVYYCSRHG |
| | | | GNFFDYWGQGTTVTVSS |
| SEQ ID NO: 3258 | VH | D-VH-H.34 | EVQLVESGGGLVQPGGSLRLSCAVSGFTFRSYG |
| | | | MSWVRQATGKGLEWVALISSGGSYTYYTDSVK |
| | | | GRFTISRENAKNSLYLQMNSLRAGDTAVYYCSR |
| | | | HGGNFFDYWGQGTTVTVSS |
| SEQ ID NO: 3259 | VH | D-VH-H.35 | EVQLVESRGVLVQPGGSLRLSCAVSGFTFRSYG |
| | | | MSWVRQAPGKGLEWVALISSGGSYTYYTDSVK |
| | | | GRFTISRDNSKNTLHLQMNSLRAEDTAVYYCSR |
| | | | HGGNFFDYWGQGTTVTVSS |
| SEQ ID NO: 3260 | VH | D-VH-H.36 | EVQLVESGGGLVQPGRSLRLSCAVSGFTFRSYG |
| | | | MSWVRQAPGKGLEWVALISSGGSYTYYTDSVK |
| | | | GRFTISRDNAKNSLYLQMNSLRAEDMALYYCSR |
| | | | HGGNFFDYWGQGTTVTVSS |
| SEQ ID NO: 3261 | VH | D-VH-H.37 | QVQLVESGGGLVQPGGSLRLSCSVSGFTFRSYG |
| | | | MSWVRQAPGKGLEWVALISSGGSYTYYTDSVK |
| | | | GRFTISRDNSKNTLYLQMNSLRAEDTAVYYCSR |
| | | | HGGNFFDYWGQGTTVTVSS |
| SEQ ID NO: 3262 | VH | D-VH-H.38 | EVQLVESGGGLVQPGGSLRLSCSVSGFTFRSYGM |
| | | | SWVRQAPGKGLEWVALISSGGSYTYYTDSVKGR |
| | | | FTISRDNSKNTLYLQMSSLRAEDTAVYYCSRHG |
| | | | GNFFDYWGQGTTVTVSS |
| SEQ ID NO: 3263 | VH | D-VH-H.39 | QVQLVESGGGVVQPGRSLRLSCAVSGFTFRSYG |
| | | | MSWVRQAPGKGLEWVALISSGGSYTYYTDSVK |
| | | | GRFTISRDNSTNTLFLQMNSLRAEDTAVYYCSRH |
| | | | GGNFFDYWGQGTTVTVSS |
| SEQ ID NO: 3264 | VH | D-VH-H.40 | QVQLLESGGGLVKPGGSLRLSCAVSGFTFRSYG |
| | | | MSWVRQAPGKGLEWVALISSGGSYTYYTDSVK |
| | | | GRFTISRDNAKNSLYLQMNSLRAEDTAVYYCSR |
| | | | HGGNFFDYWGQGTTVTVSS |
| SEQ ID NO: 3265 | VH | D-VH-H.41 | EVQLVESGEGLVQPGGSLRLSCAVSGFTFRSYG |
| | | | MSWVRQAPGKGLEWVALISSGGSYTYYTDSVK |
| | | | GRFTISRDNSKNTLYLQMGSLRAEDMAVYYCSR |
| | | | HGGNFFDYWGQGTTVTVSS |
| SEQ ID NO: 3266 | VH | D-VH-H.42 | EVQLVESGGGLVQPGGSLRLSCAVSGFTFRSYG |
| | | | MSWVRQAPGKGLEWVALISSGGSYTYYTDSVK |
| | | | GRFTISRDNSKNTLYLQMGSLRAEDMAVYYCSR |
| | | | HGGNFFDYWGQGTTVTVSS |
| SEQ ID NO: 3267 | VH | D-VH-H.43 | EVQLVESGGGLVQPGGSLRLSCSVSGFTFRSYGM |
| | | | SWVRQAPGKGLEWVALISSGGSYTYYTDSVKGR |
| | | | FTISRDNSKNTLYVQMSSLRAEDTAVYYCSRHG |
| | | | GNFFDYWGQGTTVTVSS |
| SEQ ID NO: 3268 | VH | D-VH-H.44 | EVQLVESGGGLVQPGGSLRLSCAVSGFTFRSYG |
| | | | MSWVRQAPGKGLEWVALISSGGSYTYYTDSVK |
| | | | GRFIISRDNSRNSLYLQKNRRRAEDMAVYYCSR |
| | | | HGGNFFDYWGQGTTVTVSS |
| SEQ ID NO: 3269 | VH | D-VH-H.45 | EVQLVESGGGLVQPGGSLRLSCAVSGFTFRSYG |
| | | | MSWVHQAPGKGLEWVALISSGGSYTYYTDSVK |
| | | | GRFIISRDNSRNTLYLQTNSLRAEDTAVYYCSRH |
| | | | GGNFFDYWGQGTTVTVSS |
| SEQ ID NO: 3270 | VH | D-VH-H.46 | EVHLVESGGGLVQPGGALRLSCAVSGFTFRSYG |
| | | | MSWVRQATGKGLEWVALISSGGSYTYYTDSVK |
| | | | GRFTISRENAKNSLYLQMNSLRAGDTAVYYCSR |
| | | | HGGNFFDYWGQGTTVTVSS |
| SEQ ID NO: 3271 | VH | D-VH-H.47 | EVQLVESGGGLVQPRGSLRLSCAVSGFTFRSYG |
| | | | MSWVRQAPGKGLEWVALISSGGSYTYYTDSVK |
| | | | GRFTISRDNSKNTLYLQMNNLRAEGTAVYYCSR |
| | | | HGGNFFDYWGQGTTVTVSS |
| SEQ ID NO: 3272 | VH | D-VH-H.48 | EVQLVESGGGLVQPRGSLRLSCAVSGFTFRSYG |
| | | | MSWVRQAPGKGLEWVALISSGGSYTYYTDSVK |
| | | | GRFTISRDNSKNTLYLQMNNLRAEGTAAYYCSR |
| | | | HGGNFFDYWGQGTTVTVSS |
| SEQ ID NO: 3273 | VH | D-VH-H.49 | QVQLVQSGAEVKKPGASVKVSCKVSGFTFRSYG |
| | | | MSWVRQAPGKGLEWVALISSGGSYTYYTDSVK |
| | | | GRFTITRDNSTNTLYMELSSLRSEDTAVYYCSRH |
| | | | GGNFFDYWGQGTTVTVSS |
| SEQ ID NO: 3274 | VH | D-VH-H.50 | QVQLVQSGSELKKPGASVKVSCKVSGFTFRSYG |
| | | | MSWVRQAPGQGLEWVALISSGGSYTYYTDSVK |
| | | | GRFVISRDNSVNTLYLQISSLKAEDTAVYYCSRH |
| | | | GGNFFDYWGQGTTVTVSS |

[0750] In some embodiments, the anti-TCRβ V10 antibody molecule comprises a VH or a VL of an antibody described in Table 12A, or a sequence with at least 80%, 85%, 90%, 95%, 96%, 97%, 98%, 99% or more identity thereto.

[0751] In some embodiments, the anti-TCRβ V10 antibody molecule comprises a VH and a VL of an antibody described in Table 12A, or a sequence with at least 80%, 85%, 90%, 95%, 96%, 97%, 98%, 99% or more identity thereto.

### Additional Anti-TCRVβ Antibodies

[0752] Additional exemplary anti-TCRβV antibodies of the disclosure are provided in Table 13A. In some embodiments, the anti-TCRβV antibody is a humanized antibody, e.g., as provided in Table 13A. In some embodiments, the anti-TCRβV antibody comprises one or more (e.g., all three) of a LC CDR1, LC CDR2, and LC CDR3 provided in Table 13A; and/or one or more (e.g., all three) of a HC CDR1, HC CDR2, and HC CDR3 provided in Table 13A, or a sequence with at least 95% identity thereto. In some embodiments, the anti-TCRβV antibody comprises a variable heavy chain (VH) and/or a variable light chain (VL) provided in Table 13A, or a sequence with at least 95% identity thereto.

```
TABLE 13A
Amino acid sequences for additional anti-TCRβ V antibodies
Amino acid and nucleotide sequences for murine and humanized antibody molecules
which bind to various TCRVB families are disclosed. The amino acid the heavy
and light chain CDRs, and the amino acid and nucleotide sequences of the heavy and
light chain variable regions, and the heavy and light chains are shown.
  Antibodies disclosed in the table include, MPB2D5, CAS1.1.3, IMMU222, REA1062,
JOVI-3 and IMMU546. MPB2D5 binds human TCRβV 20-1 (TCRβV2 per old nomenclature).
CAS1.1.3 binds human TCRβV 27 (TCRβV14 per old nomenclature).
  IMMU 222 binds human TCRβV 6-5, TCRβV 6-6, or TCRβV 6-9 (TCRβV13.1
per old nomenclature). REA1062 binds human TCRβV 5-1). JOVI-3 binds human TCRβV 28
(TCRβV3.1 per old nomenclature). IMMU546 binds human TCRβV 2.
Antibody G (murine) binds to human TCRVβ 20-1
```

| | | |
|---|---|---|
| SEQ ID NO: 1102 | HC CDR1 (Kabat) | SAYMH |
| SEQ ID NO: 1103 | HC CDR2 (Kabat) | RIDPATGKTKYAPKFQA |
| SEQ ID NO: 1104 | HC CDR3 (Kabat) | SLNWDYGLDY |
| SEQ ID NO: 1105 | HC CDR1 (Chothia) | GFNIKSA |
| SEQ ID NO: 1106 | HC CDR2 (Chothia) | DPATGK |
| SEQ ID NO: 1104 | HC CDR3 (Chothia) | SLNWDYGLDY |
| SEQ ID NO: 7289 | HC CDR1 (Combined) | GFNIKSAYMH |
| SEQ ID NO: 1103 | HC CDR2 (Combined) | RIDPATGKTKYAPKFQA |
| SEQ ID NO: 1104 | HC CDR3 (Combined) | SLNWDYGLDY |
| SEQ ID NO: 1107 | LC CDR1 (Kabat) | RASKSVSILGTHLIH |
| SEQ ID NO: 1108 | LC CDR2 (Kabat) | AASNLES |
| SEQ ID NO: 1109 | LC CDR3 (Kabat) | QQSIEDPWT |
| SEQ ID NO: 1110 | LC CDR1 (Chothia) | SKSVSILGTHL |
| SEQ ID NO: 1108 | LC CDR2 (Chothia) | AASNLES |
| SEQ ID NO: 1109 | LC CDR3 (Chothia) | QQSIEDPWT |
| SEQ ID NO: 1107 | LC CDR1 (Combined) | RASKSVSILGTHLIH |
| SEQ ID NO: 1108 | LC CDR2 (Combined) | AASNLES |
| SEQ ID NO: 1109 | LC CDR3 (Combined) | QQSIEDPWT |
| SEQ ID NO: 1111 | VL | DIVLTQSPASLAVSLGQRATISCRASKSVSILGTHLIH |
| | | WYQQKPGQPPKLLIYAASNLESGVPARFSGSGSETV |
| | | FTLNIHPVEEEDAATYFCQQSIEDPWTFGGGTKLGI |
| | | K |
| SEQ ID NO: 1112 | VH | EVQLQQSVADLVRPGASLKLSCTASGFNIKSAYMH |
| | | WVIQRPDQGPECLGRIDPATGKTKYAPKFQAKATIT |
| | | ADTSSNTAYLQLSSLTSEDTAIYYCTRSLNWDYGLD |
| | | YWGQGTSVTVSS |

Antibody G-H (humanized) VHs binds to human TCRVβ 20-1

| | | |
|---|---|---|
| SEQ ID NO: 1113 | VH-1 | QVQLVQSGAEVKKPGASVKVSCKASGFNIKSAYM |
| | | HWVRQAPGQGLEWMGRIDPATGKTKYAPKFQARV |
| | | TMTADTSTNTAYMELSSLRSEDTAVYYCARSLNW |
| | | DYGLDYWGQGTLVTVSS |
| SEQ ID NO: 1114 | VH-2 | QVQLVQSGAEVKKPGASVKVSCKASGFNIKSAYM |
| | | HWVRQAPGQEPGCMGRIDPATGKTKYAPKFQARV |
| | | TMTADTSINTAYTELSSLRSEDTATYYCARSLNWD |
| | | YGLDYWGQGTLVTVSS |
| SEQ ID NO: 1115 | VH-3 | QVQLVQSGAEVKKPGSSVKVSCKASGFNIKSAYMH |
| | | WVRQAPGQGLEWMGRIDPATGKTKYAPKFQARVT |
| | | ITADTSTNTAYMELSSLRSEDTAVYYCARSLNWDY |
| | | GLDYWGQGTLVTVSS |
| SEQ ID NO: 1116 | VH-4 | QVQLVQSGAEVKKPGASVKVSCKASGFNIKSAYM |
| | | HWVRQAPGQRLEWMGRIDPATGKTKYAPKFQARV |
| | | TITADTSANTAYMELSSLRSEDTAVYYCARSLNWD |
| | | YGLDYWGQGTLVTVSS |

Antibody G-H (humanized) VLs binds to human TCRVβ 20-1

| | | |
|---|---|---|
| SEQ ID NO: 1117 | VL-1 | EIVLTQSPATLSLSPGERATLSCRASKSVSILGTHLIH |
| | | WYQQKPGQAPRLLIYAASNLESGIPARFSGSGSETD |
| | | FTLTISSLEPEDFAVYFCQQSIEDPFGGGTKVEIK |
| SEQ ID NO: 1118 | VL-2 | EIVLTQSPATLSLSPGERATLSCRASKSVSILGTHLIH |
| | | WYQQKPGLAPRLLIYAASNLESGIPDRFSGSGSETD |
| | | FTLTISRLEPEDFAVYFCQQSIEDPFGGGTKVEIK |
| SEQ ID NO: 1119 | VL-3 | EIVLTQSPGTLSLSPGERATLSCRASKSVSILGTHLIH |
| | | WYQQKPGQAPRLLIYAASNLESGIPDRFSGSGSETD |
| | | FTLTISRLEPEDFAVYFCQQSIEDPFGGGTKVEIK |

Antibody H (murine) binds to human TCRVβ 27

| | | |
|---|---|---|
| SEQ ID NO: 1120 | HC CDR1 (Kabat) | DTYMY |
| SEQ ID NO: 1121 | HC CDR2 (Kabat) | RIDPANGNTKYDPKFQD |
| SEQ ID NO: 1122 | HC CDR3 (Kabat) | GSYYYAMDY |
| SEQ ID NO: 1123 | HC CDR1 (Chothia) | GFKTEDT |
| SEQ ID NO: 1124 | HC CDR2 (Chothia) | DPANGN |
| SEQ ID NO: 1122 | HC CDR3 (Chothia) | GSYYYAMDY |
| SEQ ID NO: 1125 | HC CDR1 (Combined) | GFKTEDTYMY |
| SEQ ID NO: 1121 | HC CDR2 (Combined) | RIDPANGNTKYDPKFQD |
| SEQ ID NO: 1122 | HC CDR3 (Combined) | GSYYYAMDY |
| SEQ ID NO: 1126 | LC CDR1 (Kabat) | RASESVDSYGNSFMH |
| SEQ ID NO: 1127 | LC CDR2 (Kabat) | RASNLES |
| SEQ ID NO: 1128 | LC CDR3 (Kabat) | QQSNEDPYT |
| SEQ ID NO: 7290 | LC CDR1 (Chothia) | SESVDSYGNSF |
| SEQ ID NO: 1127 | LC CDR2 (Chothia) | RASNLES |
| SEQ ID NO: 1128 | LC CDR3 (Chothia) | QQSNEDPYT |
| SEQ ID NO: 1126 | LC CDR1 (Combined) | RASESVDSYGNSFMH |
| SEQ ID NO: 1127 | LC CDR2 (Combined) | RASNLES |
| SEQ ID NO: 1128 | LC CDR3 (Combined) | QQSNEDPYT |
| SEQ ID NO: 1129 | VL | DIVLTQSPASLAVSLGQRATISCRASESVDSYGNSF |
| | | MHWYQQKPGQPPKLLIYRASNLESGIPARFSGSGSR |
| | | TDFTLTINPVEADDVATYYCQQSNEDPYTFGGGTK |
| | | LEIK |
| SEQ ID NO: 1130 | VH | EVQLQQSGAELVKPGASVKLSCTASGFKTEDTYMY |
| | | WVKQRPEQGLEWIGRIDPANGNTKYDPKFQDKATI |
| | | TADSSSNTAYLQLSSLPSEDTAVYYCARGSYYYAM |
| | | DYWGQGTSVTVSS |

Antibody H-H (humanized) VHs binds to human TCRVβ 27

| | | |
|---|---|---|
| SEQ ID NO: 1131 | VH-1 | QVQLVQSGAEVKKPGSSVKVSCKASGFKTEDTYM |
| | | YWVRQAPGQGLEWIGRIDPANGNTKYDPKFQDRA |
| | | TITADSSTNTAYMELSSLRSEDTAVYYCARGSYYY |
| | | AMDYWGQGTLVTVSS |
| SEQ ID NO: 1132 | VH-2 | QVQLVQSGAEVKKPGASVKVSCKASGFKTEDTYM |
| | | YWVRQAPGQRLEWIGRIDPANGNTKYDPKFQDRA |
| | | TITADSSANTAYMELSSLRSEDTAVYYCARGSYYY |
| | | AMDYWGQGTLVTVSS |
| SEQ ID NO: 1133 | VH-3 | EVQLVESGGGLVQPGGSLKLSCAASGFKTEDTYMY |
| | | WVRQASGKGLEWIGRIDPANGNTKYDPKFQDRATI |
| | | SADSSKNTAYLQMNSLKTEDTAVYYCARGSYYYA |
| | | MDYWGQGTLVTVSS |
| SEQ ID NO: 1134 | VH-4 | EVQLVQSGAEVKKPGESLRISCKASGFKTEDTYMY |
| | | WVRQMPGKGLEWIGRIDPANGNTKYDPKFQDQATI |
| | | SADSSINTAYLQWSSLKASDTAMYYCARGSYYYA |
| | | MDYWGQGTLVTVSS |
| SEQ ID NO: 1135 | VH-5 | QVQLVQSGSELKKPGASVKVSCKASGFKTEDTYM |
| | | YWVRQAPGQGLEWIGRIDPANGNTKYDPKFQDRA |
| | | VISADSSVNTAYLQISSLKAEDTAVYYCARGSYYY |
| | | AMDYWGQGTLVTVSS |

Antibody H-H (humanized) VLs Binds to human TCRVβ 27

| | | |
|---|---|---|
| SEQ ID NO: 1136 | VL-1 | DIVLTQSPDSLAVSLGERATINCRASESVDSYGNSF |
| | | MHWYQQKPGQPPKLLIYRASNLESGVPDRFSGSGS |
| | | RTDFTLTISSLQAEDVAVYYCQQSNEDPYTFGQGTK |
| | | LEIK |
| SEQ ID NO: 1137 | VL-2 | EIVLTQSPATLSLSPGERATLSCRASESVDSYGNSFM |
| | | HWYQQKPGQAPKLLIYRASNLESGIPARFSGSGSRT |
| | | DFTLTISRLEPEDFAVYYCQQSNEDPYTFGQGTKLEI |
| | | K |
| SEQ ID NO: 1138 | VL-3 | DIQLTQSPSSLSASVGDRVTITCRASESVDSYGNSFM |
| | | HWYQQKPGQAPKLLIYRASNLESGVPSRFSGSGSRT |
| | | DFTLTISSLQPEDVATYYCQQSNEDPYTFGQGTKLEI |
| | | K |
| SEQ ID NO: 1139 | VL-4 | AIQLTQSPSSLSASVGDRVTITCRASESVDSYGNSFM |
| | | HWYQQKPGKAPKLLIYRASNLESGVPSRFSGSGSRT |
| | | DFTLTISSLQPEDFATYYCQQSNEDPYTFGQGTKLEI |
| | | K |
| SEQ ID NO: 1140 | VL-5 | EIVLTQSPDFQSVTPKEKVTITCRASESVDSYGNSFM |
| | | HWYQQKPDQSPKLLIYRASNLESGVPSRFSGSGSRT |
| | | DFTLTINSLEAEDAATYYCQQSNEDPYTFGQGTKLE |
| | | IK |

Antibody I(murine) binds to human TCRVβ 6-5, 6-6, 6-9

| | | |
|---|---|---|
| SEQ ID NO: 1141 | HC CDR1 (Kabat) | SYAMS |
| SEQ ID NO: 1142 | HC CDR2 (Kabat) | HISNGGDYIYYADTVKG |
| SEQ ID NO: 1143 | HC CDR3 (Kabat) | PSYYSDPWFFDV |
| SEQ ID NO: 1144 | HC CDR1 (Chothia) | GFTFRSY |
| SEQ ID NO: 1145 | HC CDR2 (Chothia) | SNGGDY |
| SEQ ID NO: 1143 | HC CDR3 (Chothia) | PSYYSDPWFFDV |
| SEQ ID NO: 1146 | HC CDR1 (Combined) | GFTFRSYAMS |
| SEQ ID NO: 1142 | HC CDR2 (Combined) | HISNGGDYIYYADTVKG |
| SEQ ID NO: 1143 | HC CDR3 (Combined) | PSYYSDPWFFDV |
| SEQ ID NO: 1147 | LC CDR1 (Kabat) | SAGSSVSFMH |
| SEQ ID NO: 1148 | LC CDR2 (Kabat) | DTSKLAS |
| SEQ ID NO: 1149 | LC CDR3 (Kabat) | LQGSGFPLT |
| SEQ ID NO: 1150 | LC CDR1 (Chothia) | GSSVSF |
| SEQ ID NO: 1148 | LC CDR2 (Chothia) | DTSKLAS |
| SEQ ID NO: 1149 | LC CDR3 (Chothia) | LQGSGFPLT |
| SEQ ID NO: 1147 | LC CDR1 (Combined) | SAGSSVSFMH |
| SEQ ID NO: 1148 | LC CDR2 (Combined) | DTSKLAS |
| SEQ ID NO: 1149 | LC CDR3 (Combined) | LQGSGFPLT |
| SEQ ID NO: 1151 | VL | ENVLTQSPAIMSASPGEKVTMTCSAGSSVSFMHWY |
| | | QQKSSTSPKLWIYDTSKLASGVPGRFSGSGSGNSFS |
| | | LTISSMEAEDVAIYYCLQGSGFPLTFGSGTKLEIK |
| SEQ ID NO: 1152 | VH | DVKLVESGEGLVKPGGSLKLSCAASGFTFRSYAMS |
| | | WVRQTPEKRLEWVAHISNGGDYIYYADTVKGRFTI |
| | | SRDNARNTLYLQMSSLKSEDTAMYYCTRPSYYSDP |
| | | WFFDVWGTGTTVTVSS |

Antibody I-H (humanized) VHs
Binds to human TCRVβ 6-5, 6-6, 6-9

| | | |
|---|---|---|
| SEQ ID NO: 1153 | VH-1 | EVQLVESGGGLVQPGGSLRLSCAASGFTFRSYAMS |
| | | WVRQAPGKGLEWVAHISNGGDYIYYADTVKGRFTI |
| | | SRDNAKNSLYLQMNSLRAEDTAVYYCTRPSYYSDP |
| | | WFFDVWGQGTTVTVSS |
| SEQ ID NO: 1154 | VH-2 | QVQLVESGGGVVQPGRSLRLSCAASGFTFRSYAMS |
| | | WVRQAPGKGLEWVAHISNGGDYIYYADTVKGRFTI |
| | | SRDNSKNTLYLQMSSLRAEDTAVYYCTRPSYYSDP |
| | | WFFDVWGQGTTVTVSS |
| SEQ ID NO: 1155 | VH-3 | EVQLVESGGGLVQPGGSLRLSCAASGFTFRSYAMS |
| | | WVRQAPGKGLEWVAHISNGGDYIYYADTVKGRFTI |
| | | SRDNSKNTLYLQMNSLRAEDTAVYYCTRPSYYSDP |
| | | WFFDVWGQGTTVTVSS |
| SEQ ID NO: 1156 | VH-4 | QVQLVQSGSELKKPGASVKVSCKASGFTFRSYAMS |
| | | WVRQAPGQGLEWVAHISNGGDYIYYADTVKGRFV |
| | | ISRDNSVNTLYLQISSLKAEDTAVYYCTRPSYYSDP |
| | | WFFDVWGQGTTVTVSS |
| SEQ ID NO: 1157 | VH-5 | QVQLVQSGAEVKKPGASVKVSCKASGFTFRSYAMS |
| | | WVRQAPGQRLEWVAHISNGGDYIYYADTVKGRFTI |
| | | TRDNSANTLYMELSSLRSEDTAVYYCTRPSYYSDP |
| | | WFFDVWGQGTTVTVSS |

Antibody I-H (humanized) VLs
Binds to human TCRVβ 6-5, 6-6, 6-9

| | | |
|---|---|---|
| SEQ ID NO: 1158 | VL-1 | ENVLTQSPATLSLSPGERATLSCSAGSSVSFMHWYQ |
| | | QKPGQAPKLLIYDTSKLASGIPARFSGSGSGNDFTLT |
| | | ISSLEPEDFAVYYCLQGSGFPLTFGQGTKLEIK |
| SEQ ID NO: 1159 | VL-2 | ENVLTQSPDFQSVTPKEKVTITCSAGSSVSFMHWYQ |
| | | QKPDQSPKLLIYDTSKLASGVPSRFSGSGSGNDFTLT |
| | | INSLEAEDAATYYCLQGSGFPLTFGQGTKLEIK |
| SEQ ID NO: 1160 | VL-3 | DNQLTQSPSSLSASVGDRVTITCSAGSSVSFMHWYQ |
| | | QKPGKVPKLLIYDTSKLASGVPSRFSGSGSGNDFTL |
| | | TISSLQPEDVATYYCLQGSGFPLTFGQGTKLEIK |
| SEQ ID NO: 1161 | VL-4 | ANQLTQSPSSLSASVGDRVTITCSAGSSVSFMHWYQ |
| | | QKPGKAPKLLIYDTSKLASGVPSRFSGSGSGNDFTL |
| | | TISSLQPEDFATYYCLQGSGFPLTFGQGTKLEIK |
| SEQ ID NO: 1162 | VL-5 | DNVLTQSPDSLAVSLGERATINCSAGSSVSFMHWY |
| | | QQKPGQPPKLLIYDTSKLASGVPDRFSGSGSGNDFT |
| | | LTISSLQAEDVAVYYCLQGSGFPLTFGQGTKLEIK |

Antibody IJ (murine), Binds to human TCRVβ 5-1

| | | |
|---|---|---|
| SEQ ID NO: 1163 | HC CDR1 (Kabat) | DYNIH |
| SEQ ID NO: 1164 | HC CDR2 (Kabat) | YINPYNGRTGYNQKFKA |
| SEQ ID NO: 1165 | HC CDR3 (Kabat) | WDGSSYFDY |
| SEQ ID NO: 1166 | HC CDR1 (Chothia) | GYTFTDYNIH |
| SEQ ID NO: 1167 | HC CDR2 (Chothia) | NPYNGR |
| SEQ ID NO: 1165 | HC CDR3 (Chothia) | WDGSSYFDY |
| SEQ ID NO: 1166 | HC CDR1 (Combined) | GYTFTDYNIH |
| SEQ ID NO: 1164 | HC CDR2 (Combined) | YINPYNGRTGYNQKFKA |
| SEQ ID NO: 1165 | HC CDR3 (Combined) | WDGSSYFDY |
| SEQ ID NO: 1168 | LC CDR1 (Kabat) | SASSSVSYMH |
| SEQ ID NO: 1169 | LC CDR2 (Kabat) | EISKLAS |
| SEQ ID NO: 1170 | LC CDR3 (Kabat) | QQWNYPLLT |
| SEQ ID NO: 1297 | LC CDR1 (Chothia) | SSSVSY |
| SEQ ID NO: 1169 | LC CDR2 (Chothia) | EISKLAS |
| SEQ ID NO: 1170 | LC CDR3 (Chothia) | QQWNYPLLT |
| SEQ ID NO: 1168 | LC CDR1 (Combined) | SASSSVSYMH |
| SEQ ID NO: 1169 | LC CDR2 (Combined) | EISKLAS |
| SEQ ID NO: 1170 | LC CDR3 (Combined) | QQWNYPLLT |
| SEQ ID NO: 1171 | VL | EIVLTQSPAITAASLGQKVTITCSAS SVSYMHWYQ |
| | | QKSGTSPKPWIYEISKLASGVPARFSGSGSGTSYSLT |
| | | ISSMEAEDAAIYYCQQWNYPLLTFGAGTKLELK |
| SEQ ID NO: 1172 | VH | EVQLQQSGPVLVKPGASVRMSCKASGYTFTDYNIH |
| | | WVKQSHGRSLEWVGYINPYNGRTGYNQKFKAKAT |
| | | LTVDKSSSTAYMDLRSLTSEDSAVYYCARWDGSSY |
| | | FDYWGQGTTLTVSS |

Antibody J-H(humanized) VHs
Binds to human TCRVβ 5-1

| | | |
|---|---|---|
| SEQ ID NO: 1173 | VH-1 | QVQLVQSGAEVKKPGSSVKVSCKASGYTFTDYNIH |
| | | WVRQAPGQGLEWVGYINPYNGRTGYNQKFKARAT |
| | | LTVDKSTSTAYMELSSLRSEDTAVYYCARWDGSSY |
| | | FDYWGQGTTVTVSS |
| SEQ ID NO: 1174 | VH-2 | QVQLVQSGAEVKKPGASVKVSCKASGYTFTDYNIH |
| | | WVRQAPGQGLEWVGYINPYNGRTGYNQKFKARAT |
| | | LTVDKSTSTAYMELRSLRSDDMAVYYCARWDGSS |
| | | YFDYWGQGTTVTVSS |
| SEQ ID NO: 1175 | VH-3 | QVQLVQSGAEVKKPGASVKVSCKASGYTFTDYNIH |
| | | WVRQATGQGLEWVGYINPYNGRTGYNQKFKARA |
| | | TLTVNKSISTAYMELSSLRSEDTAVYYCARWDGSS |
| | | YFDYWGQGTTVTVSS |
| SEQ ID NO: 1176 | VH-4 | EVQLVESGGGLVQPGRSLRLSCTASGYTFTDYNIH |
| | | WVRQAPGKGLEWVGYINPYNGRTGYNQKFKARAT |
| | | LSVDKSKSIAYLQMNSLKTEDTAVYYCARWDGSSY |
| | | FDYWGQGTTVTVSS |
| SEQ ID NO: 1177 | VH-5 | QVQLVQSGSELKKPGASVKVSCKASGYTFTDYNIH |
| | | WVRQAPGQGLEWVGYINPYNGRTGYNQKFKARA |
| | | VLSVDKSVSTAYLQISSLKAEDTAVYYCARWDGSS |
| | | YFDYWGQGTTVTVSS |

Antibody J-H (humanized) VLs
Binds to human TCRVβ 5-1

| | | |
|---|---|---|
| SEQ ID NO: 1178 | VL-1 | EIVLTQSPATLSLSPGERATLSCSASSSVSYMHWYQ |
| | | QKPGQAPKLLIYEISKLASGIPARFSGSGSGTDYTLTI |
| | | SSLEPEDFAVYYCQQWNYPLLTFGQGTKLEIK |
| SEQ ID NO: 1179 | VL-2 | EIVLTQSPATLSLSPGERATLSCSASSSVSYMHWYQ |
| | | QKPGQAPKLLIYEISKLASGIPARFSGSGSGTDYTLTI |
| | | SRLEPEDFAVYYCQQWNYPLLTFGQGTKLEIK |
| SEQ ID NO: 1180 | VL-3 | EIVLTQSPDFQSVTPKEKVTITCSASSSVSYMHWYQ |
| | | QKPDQSPKLLIYEISKLASGVPSRFSGSGSGTDYTLTI |
| | | NSLEAEDAATYYCQQWNYPLLTFGQGTKLEIK |
| SEQ ID NO: 1181 | VL-4 | DIQLTQSPSFLSASVGDRVTITCSASSSVSYMHWYQ |
| | | QKPGKAPKLLIYEISKLASGVPSRFSGSGSGTEYTLT |
| | | ISSLQPEDFATYYCQQWNYPLLTFGQGTKLEIK |
| SEQ ID NO: 1182 | VL-5 | AIQLTQSPSSLSASVGDRVTITCSASSSVSYMHWYQ |
| | | QKPGKAPKLLIYEISKLASGVPSRFSGSGSGTDYTLT |
| | | ISSLQPEDFATYYCQQWNYPLLTFGQGTKLEIK |
| SEQ ID NO: 1183 | VL-6 | AIRLTQSPFSLSASVGDRVTITCSASSSVSYMHWYQ |
| | | QKPAKAPKLFIYEISKLASGVPSRFSGSGSGTDYTLT |
| | | ISSLQPEDFATYYCQQWNYPLLTFGQGTKLEIK |
| SEQ ID NO: 1184 | VL-7 | DIVLTQSPDSLAVSLGERATINCSASSSVSYMHWYQ |
| | | QKPGQPPKLLIYEISKLASGVPDRFSGSGSGTDYTLT |
| | | ISSLQAEDVAVYYCQQWNYPLLTFGQGTKLEIK |

Antibody K (murine), binds to human TCRVβ 28

| | | |
|---|---|---|
| SEQ ID NO: 1185 | HC CDR1 (Kabat) | GSWMN |
| SEQ ID NO: 1186 | HC CDR2 (Kabat) | RIYPGDGDTDYSGKFKG |
| SEQ ID NO: 1187 | HC CDR3 (Kabat) | SGYFNYVPVFDY |
| SEQ ID NO: 1188 | HC CDR1 (Chothia) | GYTFSGS |
| SEQ ID NO: 1189 | HC CDR2 (Chothia) | YPGDGD |
| SEQ ID NO: 1187 | HC CDR3 (Chothia) | SGYFNYVPVFDY |
| SEQ ID NO: 1190 | HC CDR1 (Combined) | GYTFSGSWMN |
| SEQ ID NO: 1186 | HC CDR2 (Combined) | RIYPGDGDTDYSGKFKG |
| SEQ ID NO: 1187 | HC CDR3 (Combined) | SGYFNYVPVFDY |
| SEQ ID NO: 1191 | LC CDR1 (Kabat) | SANSTVGYIH |
| SEQ ID NO: 1192 | LC CDR2 (Kabat) | TTSNLAS |
| SEQ ID NO: 1193 | LC CDR3 (Kabat) | HQWSFYPT |
| SEQ ID NO: 1194 | LC CDR1 (Chothia) | NSTVGY |
| SEQ ID NO: 1192 | LC CDR2 (Chothia) | TTSNLAS |
| SEQ ID NO: 1193 | LC CDR3 (Chothia) | HQWSFYPT |
| SEQ ID NO: 1191 | LC CDR1 (Combined) | SANSTVGYIH |
| SEQ ID NO: 1192 | LC CDR2 (Combined) | TTSNLAS |
| SEQ ID NO: 1193 | LC CDR3 (Combined) | HQWSFYPT |
| SEQ ID NO: 1195 | VL | QIVLTQSPAIMSASLGEEIALTCSANSTVGYIHWYQ |
| | | QKSGTSPKLLIYTTSNLASGVPSRFSGSGSGTFYSLTI |
| | | SSVEAEDAADYFCHQWSFYPTFGGGTKLEIK |
| SEQ ID NO: 1196 | VH | QIQLQQSGPEVVKPGASVQISCKASGYTFSGSWMN |
| | | WVKQRPGKGLEWIGRIYPGDGDTDYSGKFKGRAT |
| | | LTADKSSSTAYMRLSSLTSEDSAVYFCARSGYFNY |
| | | VPVFDYWGQGTTLSVSS |

Antibody K-H(humanized) VHs
Binds to human TCRVβ 28

| | | |
|---|---|---|
| SEQ ID NO: 1197 | VH-1 | QIQLVQSGAEVKKPGASVKVSCKASGYTFSGSWM |
| | | NWVRQAPGQGLEWIGRIYPGDGDTDYSGKFKGRA |
| | | TLTADKSTSTAYMELSSLRSEDTAVYYCARSGYFN |
| | | YVPVFDYWGQGTTVTVSS |
| SEQ ID NO: 1198 | VH-2 | QIQLVQSGAEVKKPGSSVKVSCKASGYTFSGSWMN |
| | | WVRQAPGQGLEWIGRIYPGDGDTDYSGKFKGRAT |
| | | LTADKSTSTAYMELSSLRSEDTAVYYCARSGYFNY |
| | | VPVFDYWGQGTTVTVSS |
| SEQ ID NO: 1199 | VH-3 | EIQLVQSGAEVKKPGESLKISCKASGYTFSGSWMN |
| | | WVRQMPGKGLEWIGRIYPGDGDTDYSGKFKGQAT |
| | | LSADKSISTAYLQWSSLKASDTAMYYCARSGYFNY |
| | | VPVFDYWGQGTTVTVSS |
| SEQ ID NO: 1200 | VH-4 | QIQLVQSGSELKKPGASVKVSCKASGYTFSGSWMN |
| | | WVRQAPGQGLEWIGRIYPGDGDTDYSGKFKGRAV |
| | | LSADKSVSTAYLQISSLKAEDTAVYYCARSGYFNY |
| | | VPVFDYWGQGTTVTVSS |
| SEQ ID NO: 1201 | VH-5 | QIQLVQSGSELKKPGASVKVSCKASGYTFSGSWMN |
| | | WVRQAPGQGLEWIGRIYPGDGDTDYSGKFKGRAV |
| | | LSADKSVSMAYLQISSLKAEDTAVYYCARSGYFNY |
| | | VPVFDYWGQGTTVTVSS |
| SEQ ID NO: 1202 | VH-6 | EIQLVESGGGLVQPGRSLRLSCTASGYTFSGSWMN |
| | | WVRQAPGKGLEWIGRIYPGDGDTDYSGKFKGRAT |
| | | LSADKSKSIAYLQMNSLKTEDTAVYYCARSGYFNY |
| | | VPVFDYWGQGTTVTVSS |

Antibody K-H (humanized) VLs
Binds to human TCRVβ 28

| | | |
|---|---|---|
| SEQ ID NO: 1203 | VL-1 | EIVLTQSPATLSLSPGERATLSCSANSTVGYIHWYQ |
| | | QKPGQAPKLLIYTTSNLASGIPARFSGSGSGTDYTLT |
| | | ISSLEPEDFAVYFCHQWSFYPTFGQGTKLEIK |
| SEQ ID NO: 1204 | VL-2 | DIQLTQSPSFLSASVGDRVTITCSANSTVGYIHWYQ |
| | | QKPGKAPKLLIYTTSNLASGVPSRFSGSGSGTEYTLT |
| | | ISSLQPEDFATYFCHQWSFYPTFGQGTKLEIK |
| SEQ ID NO: 1205 | VL-3 | EIVLTQSPATLSLSPGERATLSCSANSTVGYIHWYQ |
| | | QKPGQAPKLLIYTTSNLASGIPARFSGSGPGTDYTLT |
| | | ISSLEPEDFAVYFCHQWSFYPTFGQGTKLEIK |
| SEQ ID NO: 1206 | VL-4 | DIVLTQSPDSLAVSLGERATINCSANSTVGYIHWYQ |
| | | QKPGQPPKLLIYTTSNLASGVPDRFSGSGSGTDYTL |
| | | TISSLQAEDVAVYFCHQWSFYPTFGQGTKLEIK |
| SEQ ID NO: 1207 | VL-5 | EIVLTQSPDFQSVTPKEKVTITCSANSTVGYIHWYQ |
| | | QKPDQSPKLLIYTTSNLASGVPSRFSGSGSGTDYTLT |
| | | INSLEAEDAATYFCHQWSFYPTFGQGTKLEIK |

Antibody L (murine), binds to human TCRVβ 4-1, 4-2, 4-3

| | | |
|---|---|---|
| SEQ ID NO: 1208 | HC CDR1 (Kabat) | DYYMY |
| SEQ ID NO: 1209 | HC CDR2 (Kabat) | TISGGGSYTYSPDSVKG |
| SEQ ID NO: 1210 | HC CDR3 (Kabat) | ERDIYYGNFNAMVY |
| SEQ ID NO: 1211 | HC CDR1 (Chothia) | GFTFSDY |
| SEQ ID NO: 1212 | HC CDR2 (Chothia) | SGGGSY |
| SEQ ID NO: 1210 | HC CDR3 (Chothia) | ERDIYYGNFNAMVY |
| SEQ ID NO: 1213 | HC CDR1 (Combined) | GFTFSDYYMY |
| SEQ ID NO: 1209 | HC CDR2 (Combined) | TISGGGSYTYSPDSVKG |
| SEQ ID NO: 1210 | HC CDR3 (Combined) | ERDIYYGNFNAMVY |
| SEQ ID NO: 1214 | LC CDR1 (Kabat) | RASKSVSTSGYSYMH |
| SEQ ID NO: 1215 | LC CDR2 (Kabat) | LASNLES |
| SEQ ID NO: 1216 | LC CDR3 (Kabat) | QHSRDLPWT |
| SEQ ID NO: 1217 | LC CDR1 (Chothia) | SKSVSTSGYSY |
| SEQ ID NO: 1215 | LC CDR2 (Chothia) | LASNLES |
| SEQ ID NO: 1216 | LC CDR3 (Chothia) | QHSRDLPWT |
| SEQ ID NO: 1214 | LC CDR1 (Combined) | RASKSVSTSGYSYMH |
| SEQ ID NO: 1215 | LC CDR2 (Combined) | LASNLES |
| SEQ ID NO: 1216 | LC CDR3 (Combined) | QHSRDLPWT |
| SEQ ID NO: 1218 | VL | DIVLTQSPVSLTVSLGQRATISCRASKSVSTSGYSYM |
| | | HWYQQKPGQPPKLLIYLASNLESGVPARFSGSGSGT |
| | | DFTLNIHPVEEEDAATYYCQHSRDLPWTFGGGTKL |
| | | EIK |
| SEQ ID NO: 1219 | VH | EVQLVESGGGLVKPGGSLKLSCAASGFTFSDYYMY |
| | | WVRQTPEKRLEWVATISGGGSYTYSPDSVKGRFTIS |
| | | RDNAKNNLYLQMSSLRSEDTAMYFCARERDIYYG |
| | | NFNAMVYWGRGTSVTVSS |

Antibody L-H (humanized) VHs
Binds to human TCRVβ 4-1, 4-2, 4-3

| | | |
|---|---|---|
| SEQ ID NO: 1220 | VH-1 | EVQLLESGGGLVQPGGSLRLSCAASGFTFSDYYMY |
| | | WVRQAPGKGLEWVATISGGGSYTYSPDSVKGRFTI |
| | | SRDNSKNTLYLQMNSLRAEDTAVYYCARERDIYYG |
| | | NFNAMVYWGRGTLVTVSS |
| SEQ ID NO: 1221 | VH-2 | EVQLVESGGGLVQPGGSLRLSCAASGFTFSDYYMY |
| | | WVRQAPGKGLEWVATISGGGSYTYSPDSVKGRFTI |
| | | SRDNAKNSLYLQMNSLRAEDTAVYYCARERDIYY |
| | | GNFNAMVYWGRGTLVTVSS |
| SEQ ID NO: 1222 | VH-3 | QVQLVESGGGVVQPGRSLRLSCAASGFTFSDYYM |
| | | YWVRQAPGKGLEWVATISGGGSYTYSPDSVKGRF |
| | | TISRDNSKNTLYLQMNSLRAEDTAVYYCARERDIY |
| | | YGNFNAMVYWGRGTLVTVSS |
| SEQ ID NO: 1223 | VH-4 | QVQLVESGGGLVKPGGSLRLSCAASGFTFSDYYMY |
| | | WIRQAPGKGLEWVATISGGGSYTYSPDSVKGRFTIS |
| | | RDNAKNSLYLQMNSLRAEDTAVYYCARERDIYYG |
| | | NFNAMVYWGRGTLVTVSS |

Antibody L-H(humanized) VLs
Binds to human TCRVβ 4-1, 4-2, 4-3

| | | |
|---|---|---|
| SEQ ID NO: 1224 | VL-1 | EIVLTQSPGTLSLSPGERATLSCRASKSVSTSGYSYM |
| | | HWYQQKPGQAPRLLIYLASNLESGIPDRFSGSGSGT |
| | | DFTLTISRLEPEDFAVYYCQHSRDLPWTFGGGTKVE |
| | | IK |
| SEQ ID NO: 1225 | VL-2 | EIVLTQSPATLSLSPGERATLSCRASKSVSTSGYSYM |
| | | HWYQQKPGQAPRLLIYLASNLESGIPARFSGSGSGT |
| | | DFTLTISSLEPEDFAVYYCQHSRDLPWTFGGGTKVE |
| | | IK |
| SEQ ID NO: 1226 | VL-3 | DIQLTQSPSTLSASVGDRVTITCRASKSVSTSGYSYM |
| | | HWYQQKPGKAPKLLIYLASNLESGVPSRFSGSGSGT |
| | | EFTLTISSLQPDDFATYYCQHSRDLPWTFGGGTKVE |
| | | IK |
| SEQ ID NO: 1227 | VL-4 | AIQLTQSPSSLSASVGDRVTITCRASKSVSTSGYSYM |
| | | HWYQQKPGKAPKLLIYLASNLESGVPSRFSGSGSGT |
| | | DFTLTISSLQPEDFATYYCQHSRDLPWTFGGGTKVE |
| | | IK |

Antibody M (murine), binds to human TCRVβ 19

| | | |
|---|---|---|
| SEQ ID NO: 1229 | HC CDR1 (Kabat) | GYFWN |
| SEQ ID NO: 1230 | HC CDR2 (Kabat) | YISYDGSNNYNPSLKN |
| SEQ ID NO: 1231 | HC CDR3 (Kabat) | PSPGTGYAVDY |
| SEQ ID NO: 1232 | HC CDR1 (Chothia) | GYSITSGY |
| SEQ ID NO: 1233 | HC CDR2 (Chothia) | SYDGSN |
| SEQ ID NO: 1231 | HC CDR3 (Chothia) | PSPGTGYAVDY |
| SEQ ID NO: 1234 | HC CDR1 (Combined) | GYSITSGYFWN |
| SEQ ID NO: 1230 | HC CDR2 (Combined) | YISYDGSNNYNPSLKN |
| SEQ ID NO: 1231 | HC CDR3 (Combined) | PSPGTGYAVDY |
| SEQ ID NO: 1235 | LC CDR1 (Kabat) | RSSQSLVHSNGNTYLH |
| SEQ ID NO: 1236 | LC CDR2 (Kabat) | KVSNRFS |
| SEQ ID NO: 1237 | LC CDR3 (Kabat) | SQSTHVPFT |
| SEQ ID NO: 1238 | LC CDR1 (Chothia) | SQSLVHSNGNTY |
| SEQ ID NO: 1236 | LC CDR2 (Chothia) | KVSNRFS |
| SEQ ID NO: 1237 | LC CDR3 (Chothia) | SQSTHVPFT |
| SEQ ID NO: 1235 | LC CDR1 (Combined) | RSSQSLVHSNGNTYLH |
| SEQ ID NO: 1236 | LC CDR2 (Combined) | KVSNRFS |
| SEQ ID NO: 1237 | LC CDR3 (Combined) | SQSTHVPFT |
| SEQ ID NO: 1239 | VL | NVVMTQTPLSLPVSLGDQASISCRSSQSLVHSNGNT |
| | | YLHWYLQKPGQSPKFLIYKVSNRFSGVPDRFSGGG |
| | | SGTEFTLKISRVEAEDLGVYFCSQSTHVPFTFGSGTK |
| | | LEIK |
| SEQ ID NO: 1240 | VH | NVQLQESGPGLVKPSQSLSLTCSVAGYSITSGYFWN |
| | | WIRQFPGNKLEWMGYISYDGSNNYNPSLKNRISITR |
| | | DTSKNQFFLKLNSVTTEDTATYYCASPSPGTGYAV |
| | | DYWGQGTSVTVSS |

Antibody M-H (humanized) VHs
Binds to human TCRVβ 19

| | | |
|---|---|---|
| SEQ ID NO: 1241 | VH-1 | QVQLQESGPGLVKPSETLSLTCTVSGYSITSGYFWN |
| | | WIRQPPGKGLEWIGYISYDGSNNYNPSLKNRVTISR |
| | | DTSKNQFSLKLSSVTAADTAVYYCASPSPGTGYAV |
| | | DYWGQGTLVTVSS |
| SEQ ID NO: 1242 | VH-2 | QVQLQESGPGLVKPSETLSLTCTVSGYSITSGYFWN |
| | | WIRQPPGKGLEWIGYISYDGSNNYNPSLKNRVTISR |
| | | DTSKNQFSLKLSSVTAADTAVYYCASPSPGTGYAV |
| | | DYWGQGTLVTVSS |
| SEQ ID NO: 1243 | VH-3 | QVQLVESGGGLVQPGGSLRLSCSVSGYSITSGYFW |
| | | NWVRQAPGKGLEWVGYISYDGSNNYNPSLKNRFTI |
| | | SRDTSKNTFYLQMNSLRAEDTAVYYCASPSPGTGY |
| | | AVDYWGQGTLVTVSS |

Antibody M-H (humanized) VLs
Binds to human TCRVβ 19

| | | |
|---|---|---|
| SEQ ID NO: 1244 | VL-1 | VVMTQSPGTLSLSPGERATLSCRSSQSLVHSNGNTY |
| | | LHWYQQKPGQAPRFLIYKVSNRFSGIPDRFSGSGSG |
| | | TDFTLTISRLEPEDFAVYFCSQSTHVPFTFGQGTKLE |
| | | IK |
| SEQ ID NO: 1245 | VL-2 | EVVMTQSPATLSLSPGERATLSCRSSQSLVHSNGNT |
| | | YLHWYQQKPGQAPRFLIYKVSNRFSGIPARFSGSGS |
| | | GTDFTLTISSLEPEDFAVYFCSQSTHVPFTFGQGTKL |
| | | EIK |
| SEQ ID NO: 1246 | VL-3 | EVVMTQSPATLSVSPGERATLSCRSSQSLVHSNGNT |
| | | YLHWYQQKPGQAPRFLIYKVSNRFSGIPARFSGSGS |
| | | GTEFTLTISSLQSEDFAVYFCQ STHVPFTFGQGTKL |
| | | EIK |
| SEQ ID NO: 1247 | VL-4 | DVQMTQSPSSLSASVGDRVTITCRSSQSLVHSNGNT |
| | | YLHWYQQKPGKAPKFLIYKVSNRFSGVPSRFSS GS |
| | | GTDFTFTISSLQPEDIATYFCSQSTHVPFTFGQGTKL |
| | | EIK |

Antibody N(murine), binds to human TCRVβ 9

| | | |
|---|---|---|
| SEQ ID NO: 1248 | HC CDR1 (Kabat) | DYIVH |
| SEQ ID NO: 1249 | HC CDR2 (Kabat) | WINTYTGTPTYADDFEG |
| SEQ ID NO: 1250 | HC CDR3 (Kabat) | SWRRGIRGIGFDY |
| SEQ ID NO: 1251 | HC CDR1 (Chothia) | GYTFTDY |
| SEQ ID NO: 1252 | HC CDR2 (Chothia) | NTYTGT |
| SEQ ID NO: 1250 | HC CDR3 (Chothia) | SWRRGIRGIGFDY |
| SEQ ID NO: 1253 | HC CDR1 (Combined) | GYTFTDYIVH |
| SEQ ID NO: 1249 | HC CDR2 (Combined) | WINTYTGTPTYADDFEG |
| SEQ ID NO: 1250 | HC CDR3 (Combined) | SWRRGIRGIGFDY |
| SEQ ID NO: 1254 | LC CDR1 (Kabat) | KASKSINKYLA |
| SEQ ID NO: 1255 | LC CDR2 (Kabat) | DGSTLQS |
| SEQ ID NO: 1256 | LC CDR3 (Kabat) | QQHNEYPPT |
| SEQ ID NO: 1257 | LC CDR1 (Chothia) | SKSINKY |
| SEQ ID NO: 1255 | LC CDR2 (Chothia) | DGSTLQS |
| SEQ ID NO: 1256 | LC CDR3 (Chothia) | QQHNEYPPT |
| SEQ ID NO: 1254 | LC CDR1 (Combined) | KASKSINKYLA |
| SEQ ID NO: 1255 | LC CDR2 (Combined) | DGSTLQS |
| SEQ ID NO: 1256 | LC CDR3 (Combined) | QQHNEYPPT |
| SEQ ID NO: 1258 | VL | DVQMTQSPYNLAASPGESVSINCKASKSINKYLAW |
| | | YQQKPGKPNKLLIYDGSTLQSGIPSRFSGSGSGTDFT |
| | | LTIRGLEPEDFGLYYCQQHNEYPPTFGAGTKLELK |
| SEQ ID NO: 1259 | VH | QLQLVQSGPELREPGESVKISCKASGYTFTDYIVHW |
| | | VKQAPGKGLKWMGWINTYTGTPTYADDFEGRFVF |
| | | SLEASASTANLQISNLKNEDTATYFCARSWRRGIRG |
| | | IGFDYWGQGVMVTVSS |

Antibody N-H (humanized) VH's
Binds to human TCRVβ 9

| | | |
|---|---|---|
| SEQ ID NO: 1260 | VH-1 | QLQLVQSGAEVKKPGASVKVSCKASGYTFTDYIVH |
| | | WVRQAPGQGLEWMGWINTYTGTPTYADDFEGWV |
| | | TMTLDASISTAYMELSRLRSDDTAVYYCARSWRRG |
| | | IRGIGFDYWGQGTMVTVSS |
| SEQ ID NO: 1261 | VH-2 | QLQLVQSGAEVKKPGASVKVSCKASGYTFTDYIVH |
| | | WVRQAPGQGLEWMGWINTYTGTPTYADDFEGRVT |
| | | MTLDASTSTAYMELSSLRSEDTAVYYCARSWRRGI |
| | | RGIGFDYWGQGTMVTVSS |
| SEQ ID NO: 1262 | VH-3 | QLQLVQSGAEVKKPGASVKVSCKASGYTFTDYIVH |
| | | WVRQAPGQRLEWMGWINTYTGTPTYADDFEGRVT |
| | | ITLDASASTAYMELSSLRSEDMAVYYCARSWRRGI |
| | | RGIGFDYWGQGTMVTVSS |
| SEQ ID NO: 1263 | VH-4 | QLQLVQSGAEVKKPGASVKVSCKASGYTFTDYIVH |
| | | WVRQATGQGLEWMGWINTYTGTPTYADDFEGRV |
| | | TMTLNASISTAYMELSSLRSEDTAVYYCARSWRRGI |
| | | RGIGFDYWGQGTMVTVSS |

Antibody N-H (humanized) VL's
Binds to human TCRVβ 9

| | | |
|---|---|---|
| SEQ ID NO: 1264 | VL-1 | EVVMTQSPGTLSLSPGERATLSCKASKSINKYLAW |
| | | YQQKPGQAPRLLIYDGSTLQSGIPDRFSGSGSGTDFT |
| | | LTISRLEPEDFAVYYCQQHNEYPPTFGQGTKLEIK |
| SEQ ID NO: 1265 | VL-2 | EVVMTQSPATLSLSPGERATLSCKASKSINKYLAW |
| | | YQQKPGQAPRLLIYDGSTLQSGIPARFSGSGSGTDFT |
| | | LTISSLEPEDFAVYYCQQHNEYPPTFGQGTKLEIK |
| SEQ ID NO: 1266 | VL-3 | DVQMTQSPSSLSASVGDRVTITCKASKSINKYLAW |
| | | YQQKPGKAPKLLIYDGSTLQSGVPSRFSGSGSGTDF |
| | | TLTISSLQPEDFATYYCQQHNEYPPTFGQGTKLEIK |
| SEQ ID NO: 1267 | VL-4 | AVRMTQSPSSFSASTGDRVTITCKASKSINKYLAWY |
| | | QQKPGKAPKLLIYDGSTLQSGVPSRFSGSGSGTDFT |
| | | LTISCLQSEDFATYYCQQHNEYPPTFGQGTKLEIK |

Antibody O (murine) binds to TRVβ 11-2

| | | |
|---|---|---|
| SEQ ID NO: 1268 | HC CDR1 (Kabat) | NYGVH |
| SEQ ID NO: 1269 | HC CDR2 (Kabat) | VIWSDGSTDYDTAFIS |
| SEQ ID NO: 1270 | HC CDR3 (Kabat) | RAVVADFDY |
| SEQ ID NO: 1271 | HC CDR1 (Chothia) | GFSLTN |
| SEQ ID NO: 1272 | HC CDR2 (Chothia) | VIWSDGSTD |
| SEQ ID NO: 1270 | HC CDR3 (Chothia) | RAVVADFDY |
| SEQ ID NO: 1273 | HC CDR1 (combined) | GFSLTNYGVH |
| SEQ ID NO: 1269 | HC CDR2 (combined) | VIWSDGSTDYDTAFIS |
| SEQ ID NO: 1270 | HC CDR3 (combined) | RAVVADFDY |
| SEQ ID NO: 1274 | VH | QVQLKQSGPGLLQPSQSLSITCTVSGFSLTNYGVHW |
| | | VRQSPGKGLEWLGVIWSDGSTDYDTAFISRLSISKD |
| | | NSKSQVFFKLNSLQADDTAIYYCARRAVVADFDY |
| | | WGQGTTLTVSS |
| SEQ ID NO: 1275 | LC CDR1 (Kabat) | KASKEVTIFGSISALH |
| SEQ ID NO: 1276 | LC CDR2 (Kabat) | NGAKLES |
| SEQ ID NO: 1277 | LC CDR3 (Kabat) | LQNKEVPFT |
| SEQ ID NO: 1275 | LC CDR1 (Chothia) | KASKEVTIFGSISALH |
| SEQ ID NO: 1276 | LC CDR2 (Chothia) | NGAKLES |
| SEQ ID NO: 1277 | LC CDR3 (Chothia) | LQNKEVPFT |
| SEQ ID NO: 1275 | LC CDR1 (combined) | KASKEVTIFGSISALH |
| SEQ ID NO: 1276 | LC CDR2 (combined) | NGAKLES |
| SEQ ID NO: 1277 | LC CDR3 (combined) | LQNKEVPFT |
| SEQ ID NO: 1278 | VL | DIVLTQSPASLAVSLGQKATISCKASKEVTIFGSISA |
| | | LHWYQQKPGQPPKLIYNGAKLESGVSARFSDSGSQ |
| | | NRSPFGNQLSFTLTIAPVEADDAATYYCLQNKEVP |
| | | FTFGSGTKLEIK |

Antibody O-H (humanized) VL binds to TRvβ 11-2

| | | |
|---|---|---|
| SEQ ID NO: 1279 | VL-1 | DIVLTQSPDSLAVSLGERATINCKASKEVTIFGSISA |
| | | LHWYQQKPGQPPKLLYNGAKLESGVSARFGVPDR |
| | | FSRSGSGLDFTLTISSLQAEDVAVYYCLQNKEVPFT |
| | | FGQGTKLEIK |
| SEQ ID NO: 1280 | VL-2 | EIVLTQSPDFQSVTPKEKVTITCKASKEVTIFGSISA |
| | | LHWYQQKPDQSPKLLYNGAKLESGVSARFGVPSR |
| | | FSRSGSGLDFTLTINSLEAEDAATYYCLQNKEVPFT |
| | | FGQGTKLEIK |
| SEQ ID NO: 1281 | VL-3 | AIQLTQSPSSLSASVGDRVTITCKASKEVTIFGSISA |
| | | LHWYQQKPGKAPKLLYNGAKLESGVSARFGVPSR |
| | | FSRSGSGLDFTLTISSLQPEDFATYYCLQNKEVPFTF |
| | | GQGTKLEIK |
| SEQ ID NO: 1282 | VL-4 | DIVLTQTPLSLSVTPGQPASISCKASKEVTIFGSISAL |
| | | HWYLQKPGQPPKLLYNGAKLESGVSARFGVPDRF |
| | | SRSGSGLDFTLKISRVEAEDVGVYYCLQNKEVPFT |
| | | FGQGTKLEIK |

Antibody O-H (humanized) VH, binds to TRvβ 11-2

| | | |
|---|---|---|
| SEQ ID NO: 1283 | VH-1 | QVTLKESGPVLVKPTETLTLTCTVSGFSLTNYGVH |
| | | WVRQPPGKALEWLGVIWSDGSTDYDTAFISRLTIS |
| | | KDNSKSQVVLTMTNMDPVDTATYYCARRAVVAD |
| | | FDYWGQGTTVTVSS |
| SEQ ID NO: 1284 | VH-2 | QVQLQESGPGLVKPSGTLSLTCAVSGFSLTNYGVH |
| | | WVRQPPGKGLEWLGVIWSDGSTDYDTAFISRLTIS |
| | | KDNSKSQVSLKLSSVTAADTAVYYCARRAVVADF |
| | | DYWGQGTTVTVSS |
| SEQ ID NO: 1285 | VH-3 | QVQLQQSGPGLVKPSQTLSLTCAVSGFSLTNYGVH |
| | | WVRQSPSRGLEWLGVIWSDGSTDYDTAFISRLTIN |
| | | KDNSKSQVSLQLNSVTPEDTAVYYCARRAVVADF |
| | | DYWGQGTTVTVSS |
| SEQ ID NO: 1286 | VH-4 | EVQLVESGGGLVQPGPSLRLSCTVSGFSLTNYGVH |
| | | WVRQAPGKGLEWLGVIWSDGSTDYDTAFISRLTIS |
| | | KDNSKSIVYLQMNSLKTEDTAVYYCARRAVVADF |
| | | DYWGQGTTVTVSS |
| SEQ ID NO: 1287 | VH-5 | EVQLVQSGAEVKKPGESLRISCKVSGFSLTNYGVH |
| | | WVRQMPGKGLEWLGVIWSDGSTDYDTAFISQLTIS |
| | | KDNSISTVYLQWSSLKASDTAMYYCARRAVVADF |
| | | DYWGQGTTVTVSS |

IMMU546 binds to TRBV 2

### Cytokine Molecules and Cytokine Inhibitor Molecules

[0753] Cytokines are generally polypeptides that influence cellular activity, for example, through signal transduction pathways. Accordingly, a cytokine of the multispecific or multifunctional polypeptide is useful and can be associated with receptor-mediated signaling that transmits a signal from outside the cell membrane to modulate a response within the cell. Cytokines are proteinaceous signaling compounds that are mediators of the immune response. They control many different cellular functions including proliferation, differentiation and cell survival/apoptosis; cytokines are also involved in several pathophysiological processes including viral infections and autoimmune diseases. Cytokines are synthesized under various stimuli by a variety of cells of both the innate (monocytes, macrophages, dendritic cells) and adaptive (T- and B-cells) immune systems. Cytokines can be classified into two groups: pro- and anti-inflammatory. Pro-inflammatory cytokines, including IFNγ, IL-1, IL-6 and TNF-alpha, are predominantly derived from the innate immune cells and Th1 cells. Anti-inflammatory cytokines, including IL-10, IL-4, IL-13 and IL-5, are synthesized from Th2 immune cells.

[0754] The present disclosure provides, inter alia, multispecific (e.g., bi-, tri-, quad-specific) or multifunctional molecules, that include, e.g., are engineered to contain, one or more cytokine molecules, e.g., immunomodulatory (e.g., proinflammatory) cytokines and variants, e.g., functional variants, thereof. Accordingly, in some embodiments, the cytokine molecule is an interleukin or a variant, e.g., a functional variant thereof. In some embodiments the interleukin is a proinflammatory interleukin. In some embodiments the interleukin is chosen from interleukin-2 (IL-2), interleukin-12 (IL-12), interleukin-15 (IL-15), interleukin-18 (IL-18), interleukin-21 (IL-21), interleukin-7 (IL-7), or interferon gamma. In some embodiments, the cytokine molecule is a proinflammatory cytokine.

[0755] In certain embodiments, the cytokine is a single chain cytokine. In certain embodiments, the cytokine is a multichain cytokine (e.g., the cytokine comprises 2 or more (e.g., 2) polypeptide chains. An exemplary multichain cytokine is IL-12.

[0756] Examples of useful cytokines include, but are not limited to, GM-CSF, IL-la, IL-10, IL-2, IL-3, IL-4, IL-5, IL-6, IL-7, IL-8, IL-10, IL-12, IL-21, IFN-α, IFN-γ, MIP-la, MIP-10, TGF-β, TNF-α, and TNFβ. In one embodiment the cytokine of the multispecific or multifunctional polypeptide is a cytokine selected from the group of GM-CSF, IL-2, IL-7, IL-8, IL-10, IL-12, IL-15, IL-21, IFN-α, IFN-γ, MIP-la, MIP-1β and TGF-β. In one embodiment the cytokine of the i the multispecific or multifunctional polypeptide is a cytokine selected from the group of IL-2, IL-7, IL-10, IL-12, IL-15, IFN-α, and IFN-γ. In certain embodiments the cytokine is mutated to remove N- and/or O-glycosylation sites. Elimination of glycosylation increases homogeneity of the product obtainable in recombinant production.

[0757] In one embodiment, the cytokine of the multispecific or multifunctional polypeptide is IL-2. In a specific embodiment, the IL-2 cytokine can elicit one or more of the cellular responses selected from the group consisting of: proliferation in an activated T lymphocyte cell, differentiation in an activated T lymphocyte cell, cytotoxic T cell (CTL) activity, proliferation in an activated B cell, differentiation in an activated B cell, proliferation in a natural killer (NK) cell, differentiation in a NK cell, cytokine secretion by an activated T cell or an NK cell, and NK/lymphocyte activated killer (LAK) antitumor cytotoxicity. In another particular embodiment the IL-2 cytokine is a mutant IL-2 cytokine having reduced binding affinity to the .alpha.-subunit of the IL-2 receptor. Together with the .beta.- and .gamma.-subunits (also known as CD122 and CD132, respectively), the .alpha.-subunit (also known as CD25) forms the heterotrimeric high-affinity IL-2 receptor, while the dimeric receptor consisting only of the β- and γ-subunits is termed the intermediate-affinity IL-2 receptor. As described in PCT patent application number PCT/EP2012/051991, which is incorporated herein by reference in its entirety, a mutant IL-2 polypeptide with reduced binding to the .alpha.-subunit of the IL-2 receptor has a reduced ability to induce IL-2 signaling in regulatory T cells, induces less activation-induced cell death (AICD) in T cells, and has a reduced toxicity profile in vivo, compared to a wild-type IL-2 polypeptide. The use of such an cytokine with reduced toxicity is particularly advantageous in a multispecific or multifunctional polypeptide according to the invention, having a long serum half-life due to the presence of an Fc domain. In one embodiment, the mutant IL-2 cytokine of the multispecific or multifunctional polypeptide according to the invention comprises at least one amino acid mutation that reduces or abolishes the affinity of the mutant IL-2 cytokine to the .alpha.-subunit of the IL-2 receptor (CD25) but preserves the affinity of the mutant IL-2 cytokine to the intermediate-affinity IL-2 receptor (consisting of the β and γ subunits of the IL-2 receptor), compared to the non-mutated IL-2 cytokine. In one embodiment the one or more amino acid mutations are amino acid substitutions. In a specific embodiment, the mutant IL-2 cytokine comprises one, two or three amino acid substitutions at one, two or three position(s) selected from the positions corresponding to residue 42, 45, and 72 of human IL-2. In a more specific embodiment, the mutant IL-2 cytokine comprises three amino acid substitutions at the positions corresponding to residue 42, 45 and 72 of human IL-2. In an even more specific embodiment, the mutant IL-2 cytokine is human IL-2 comprising the amino acid substitutions F42A, Y45A and L72G. In one embodiment the mutant IL-2 cytokine additionally comprises an amino acid mutation at a position corresponding to position 3 of human IL-2, which eliminates the 0-glycosylation site of IL-2. Particularly, said additional amino acid mutation is an amino acid substitution replacing a threonine residue by an alanine residue. A particular mutant IL-2 cytokine useful in the invention comprises four amino acid substitutions at positions corresponding to residues 3, 42, 45 and 72 of human IL-2. Specific amino acid substitutions are T3A, F42A, Y45A and L72G. As demonstrated in PCT patent application number PCT/EP2012/051991 and in the appended Examples, said quadruple mutant IL-2 polypeptide (IL-2 qm) exhibits no detectable binding to CD25, reduced ability to induce apoptosis in T cells, reduced ability to induce IL-2 signaling in T.sub.reg cells, and a reduced toxicity profile in vivo. However, it retains ability to activate IL-2 signaling in effector cells, to induce proliferation of effector cells, and to generate IFN-γ as a secondary cytokine by NK cells.

[0758] The IL-2 or mutant IL-2 cytokine according to any of the above embodiments may comprise additional mutations that provide further advantages such as increased expression or stability. For example, the cysteine at position 125 may be replaced with a neutral amino acid such as alanine, to avoid the formation of disulfide-bridged IL-2 dimers. Thus, in certain embodiments the IL-2 or mutant IL-2 cytokine of the multispecific or multifunctional polypeptide according to the invention comprises an additional amino acid mutation at a position corresponding to residue 125 of human IL-2. In one embodiment said additional amino acid mutation is the amino acid substitution C125A.

[0759] In a specific embodiment the IL-2 cytokine of the multispecific or multifunctional polypeptide comprises the polypeptide sequence of SEQ ID NO: 7227 [APTSSSTKKTQLQLEHLLLDLQMILNGINNYKNPKLTRMLTFKFYMPKKATELKHLQCL EEELKPLEEVLNLAQSKNFHLRPRDLISNINVIVLELKGSETTFMCEYADETATIVEFLNR WITFAQSIISTLT]. In another specific embodiment the IL-2 cytokine of the multispecific or multifunctional polypeptide comprises the polypeptide sequence of SEQ ID NO: 7228

[APASSSTKKTQLQLEHLLLDLQMILNGINNYKNPKLTRMLTAKFAMPK
KATELKHLQCLEEELKPLEEVLNGAQSKNFHLRPRDLISNINVIVLELK
GSETTFMCEYADETATIVEFLNRWITFAQSIISTLT].

[0760] In another embodiment the cytokine of the multispecific or multifunctional polypeptide is IL-12. In a specific embodiment said IL-12 cytokine is a single chain IL-12 cytokine. In an even more specific embodiment the single chain IL-12 cytokine comprises the polypeptide sequence of SEQ ID NO: 7229 [IWELKKDVYVVELDWYPDAPGEMVVLTCDTPEEDGITWTLDQSSEVLGSGKTLTIQVK EFGDAGQYTCHKGGEVLSHSLLLLHKKEDGIWSTDILKDQKEPKNKTFLRCEAKNYSGR FTCWWLTTISTDLTFSVKSSRGSSDPQGVTCGAATLSAERVRGDNKEYEYSVECQEDSA CPAAEESLPIEVMVDAVHKLKYENYTSSFFIRDIIKPDPPKNLQLKPLKNSRQVEVSWEY PDTWSTPHSYFSLTFCVQVQGKSKREKKDRVFTDKTSATVICRKNASISVRAQDRYYSS SWSEWASVPCSGGGGSGGGGSGGGGSRNLPVATPDPGMFPCLHESQNLLRAVSNMLQ KARQTLEFYPCTSEEIDHEDITKDKTSTVEACLPLELTKNESCLNSRETSFITNGSCLASRK TSFMMALCLSSIYEDLKMYQVEFKTMNAKLLMDPKRQIFLDQNMLAVIDELMQALNFN SETVPQKSSLEEPDFYKTKIKLCILLHAFRIRAVTIDRVMSYLNAS]. In one embodiment, the IL-12 cytokine can elicit one or more of the cellular responses selected from the group consisting of: proliferation in a NK cell, differentiation in a NK cell, proliferation in a T cell, and differentiation in a T cell.

[0761] In another embodiment the cytokine of the multispecific or multifunctional polypeptide is IL-10. In a specific embodiment said IL-10 cytokine is a single chain IL-10 cytokine. In an even more specific embodiment the single chain IL-10 cytokine comprises the polypeptide sequence of SEQ ID NO: 7230 [SPGQGTQSENSCTHFPGNLPNMLRDLRDAFSRVKTFFQMKDQLDNLLLKESLLEDFKG YLGCQALSEMIQFYLEEVMPQAENQDPDIKAHVNSLGENLKTLRLRLRRCHRFLPCENK SKAVEQVKNAFNKLQEKGIYKAMSEFDIFINYIEAYMTMKIRNGGGGSGGGGSGGGGS GGGGSSPGQGTQSENSCTHFPGNLPNMLRDLRDAFSRVKTFFQMKDQLDNLLLKESLLE DFKGYLGCQALSEMIQFYLEEVMPQAENQDPDIKAHVNSLGENLKTLRLRLRRCHRFLP CENKSKAVEQVKNAFNKLQEKGIYKAMSEFDIFINYIEAYMTMKIRN]. In another specific embodiment the IL-10 cytokine is a monomeric IL-10 cytokine. In a more specific embodiment the monomeric IL-10 cytokine comprises the polypeptide sequence of SEQ ID NO: 7231 [SPGQGTQSENSCTHFPGNLPNMLRDLRDAFSRVKTFFQMKDQLDNLLLKESLLEDFKG YLGCQALSEMIQFYLEEVMPQAENQDPDIKAHVNSLGENLKTLRLRLRRCHRFLPCENG GGSGGKSKAVEQVKNAFNKLQEKGIYKAMSEFDIFINYIEAYMTMKIRN]. In one embodiment, the IL-10 cytokine can elicit one or more of the cellular responses selected from the group consisting of: inhibition of cytokine secretion, inhibition of antigen presentation by antigen presenting cells, reduction of oxygen radical release, and inhibition of T cell proliferation. A multispecific or multifunctional polypeptide according to the invention wherein the cytokine is IL-10 is particularly useful for downregulation of inflammation, e.g. in the treatment of an inflammatory disorder.

[0762] In another embodiment, the cytokine of the multispecific or multifunctional polypeptide is IL-15. In a specific embodiment said IL-15 cytokine is a mutant IL-15 cytokine having reduced binding affinity to the α-subunit of the IL-15 receptor. Without wishing to be bound by theory, a mutant IL-15 polypeptide with reduced binding to the .alpha.-subunit of the IL-15 receptor has a reduced ability to bind to fibroblasts throughout the body, resulting in improved pharmacokinetics and toxicity profile, compared to a wild-type IL-15 polypeptide. The use of an cytokine with reduced toxicity, such as the described mutant IL-2 and mutant IL-15 effector moieties, is particularly advantageous in a multispecific or multifunctional polypeptide according to the invention, having a long serum half-life due to the presence of an Fc domain. In one embodiment the mutant IL-15 cytokine of the multispecific or multifunctional polypeptide according to the invention comprises at least one amino acid mutation that reduces or abolishes the affinity of the mutant IL-15 cytokine to the .alpha.-subunit of the IL-15 receptor but preserves the affinity of the mutant IL-15 cytokine to the intermediate-affinity IL-15/IL-2 receptor (consisting of the .beta.- and .gamma.-subunits of the IL-15/IL-2 receptor), compared to the non-mutated IL-15 cytokine. In one embodiment the amino acid mutation is an amino acid substitution. In a specific embodiment, the mutant IL-15 cytokine comprises an amino acid substitution at the position corresponding to residue 53 of human IL-15. In a more specific embodiment, the mutant IL-15 cytokine is human IL-15 comprising the amino acid substitution E53A. In one embodiment the mutant IL-15 cytokine additionally comprises an amino acid mutation at a position corresponding to position 79 of human IL-15, which eliminates the N-glycosylation site of IL-15. Particularly, said additional amino acid mutation is an amino acid substitution replacing an asparagine residue by an alanine residue. In an even more specific embodiment the IL-15 cytokine comprises the polypeptide sequence of SEQ ID NO: 7232 [NWVNVISDLKKIEDLIQSMHIDATLYTESDVHPSCKVTAMKCFLLELQVISLASGDASIH DTVENLIILANNSLSSNGAVTESGCKECEELEEKNIKEFLQSFVHIVQMFINTS]. In one embodiment, the IL-15 cytokine can elicit one or more of the cellular responses selected from the group consisting of: proliferation in an activated T lymphocyte cell, differentiation in an activated T lymphocyte cell, cytotoxic T cell (CTL) activity, proliferation in an activated B cell, differentiation in an activated B cell, proliferation in a natural killer (NK) cell, differentiation in a NK cell, cytokine secretion by an activated T cell or an NK cell, and NK/lymphocyte activated killer (LAK) antitumor cytotoxicity.

[0763] Mutant cytokine molecules useful as effector moieties in the multispecific or multifunctional polypeptide can be prepared by deletion, substitution, insertion or modification using genetic or chemical methods well known in the art. Genetic methods may include site-specific mutagenesis of the encoding DNA sequence, PCR, gene synthesis, and the like. The correct nucleotide changes can be verified for example by sequencing. Substitution or insertion may involve natural as well as non-natural amino acid residues. Amino acid modification includes well known methods of chemical modification such as the addition or removal of glycosylation sites or carbohydrate attachments, and the like.

[0764] In one embodiment, the cytokine, particularly a single-chain cytokine, of the multispecific or multifunctional polypeptide is GM-CSF. In a specific embodiment, the GM-CSF cytokine can elicit proliferation and/or differentiation in a granulocyte, a monocyte or a dendritic cell. In one embodiment, the cytokine, particularly a single-chain cytokine, of the multispecific or multifunctional polypeptide is IFN-α. In a specific embodiment, the IFN-α cytokine can elicit one or more of the cellular responses selected from the group consisting of: inhibiting viral replication in a virus-infected cell, and upregulating the expression of major histocompatibility complex I (MHC I). In another specific embodiment, the IFN-α cytokine can inhibit proliferation in a tumor cell. In one embodiment the cytokine, particularly a single-chain cytokine, of the multispecific or multifunctional polypeptide is IFNγ. In a specific embodiment, the IFN-γ cytokine can elicit one or more of the cellular responses selected from the group of: increased macrophage activity, increased expression of MHC molecules, and increased NK cell activity. In one embodiment the cytokine, particularly a single-chain cytokine, of the multispecific or multifunctional polypeptide is IL-7. In a specific embodiment, the IL-7 cytokine can elicit proliferation of T and/or B lymphocytes. In one embodiment, the cytokine, particularly a single-chain cytokine, of the multispecific or multifunctional polypeptide is IL-8. In a specific embodiment, the IL-8 cytokine can elicit chemotaxis in neutrophils. In one embodiment, the cytokine, particularly a single-chain cytokine, of the multispecific or multifunctional polypeptide, is MIP-la. In a specific embodiment, the MIP-la cytokine can elicit chemotaxis in monocytes and T lymphocyte cells. In one embodiment, the cytokine, particularly a single-chain cytokine, of the multispecific or multifunctional polypeptide is MIP-1β. In a specific embodiment, the MIP-1β cytokine can elicit chemotaxis in monocytes and T lymphocyte cells. In one embodiment, the cytokine, particularly a single-chain cytokine, of the multispecific or multifunctional polypeptide is TGF-β. In a specific embodiment, the TGF-β cytokine can elicit one or more of the cellular responses selected from the group consisting of: chemotaxis in monocytes, chemotaxis in macrophages, upregulation of IL-1 expression in activated macrophages, and upregulation of IgA expression in activated B cells.

[0765] In one embodiment, the multispecific or multifunctional polypeptide of the invention binds to an cytokine receptor with a dissociation constant (K_{D}) that is at least about 1, 1.5, 2, 2.5, 3, 3.5, 4, 4.5, 5, 5.5, 6, 6.5, 7, 7.5, 8, 8.5, 9, 9.5 or 10 times greater than that for a control cytokine. In another embodiment, the multispecific or multifunctional polypeptide binds to an cytokine receptor with a K_{D} that is at least 2, 3, 4, 5, 6, 7, 8, 9, or 10 times greater than that for a corresponding multispecific or multifunctional polypeptide comprising two or more effector moieties. In another embodiment, the multispecific or multifunctional polypeptide binds to an cytokine receptor with a dissociation constant K_{D} that is about 10 times greater than that for a corresponding the multispecific or multifunctional polypeptide comprising two or more cytokines.

[0766] In some embodiments, the multispecific molecules disclosed herein include a cytokine molecule. In embodiments, the cytokine molecule includes a full length, a fragment or a variant of a cytokine; a cytokine receptor domain, e.g., a cytokine receptor dimerizing domain; or an agonist of a cytokine receptor, e.g., an antibody molecule (e.g., an agonistic antibody) to a cytokine receptor.

[0767] In some embodiments the cytokine molecule is chosen from IL-2, IL-12, IL-15, IL-18, IL-7, IL-21, or interferon gamma, or a fragment or variant thereof, or a combination of any of the aforesaid cytokines. The cytokine molecule can be a monomer or a dimer. In embodiments, the cytokine molecule can further include a cytokine receptor dimerizing domain.

[0768] In other embodiments, the cytokine molecule is an agonist of a cytokine receptor, e.g., an antibody molecule (e.g., an agonistic antibody) to a cytokine receptor chosen from an IL-15Ra or IL-21R.

[0769] In one embodiment, the cytokine molecule is IL-15, e.g., human IL-15 (e.g., comprising the amino acid sequence: NWVNVISDLKKIEDLIQSMHIDATLYTESDVHPSCKVTAMKCFLLELQVISLESGDASIH DTVENLIILANNSLSSNGNVTESGCKECEELEEKNIKEFLQSFVHIVQMFINTS (SEQ ID NO: 7017), a fragment thereof, or an amino acid sequence substantially identical thereto (e.g., 95% to 99.9% identical thereto, or having at least one amino acid alteration, but not more than five, ten or fifteen alterations (e.g., substitutions, deletions, or insertions, e.g., conservative substitutions) to the amino acid sequence of SEQ ID NO: 7017.

[0770] In some embodiments, the cytokine molecule comprises a receptor dimerizing domain, e.g., an IL15Ralpha dimerizing domain. In one embodiment, the IL15Ralpha dimerizing domain comprises the amino acid sequence: MAPRRARGCRTLGLPALLLLLLLRPPATRGITCPPPMSVEHADIWVKSYSLYSRERYICN SGFKRKAGTSSLTECVL (SEQ ID NO: 7018), a fragment thereof, or an amino acid sequence substantially identical thereto (e.g., 95% to 99.9% identical thereto, or having at least one amino acid alteration, but not more than five, ten or fifteen alterations (e.g., substitutions, deletions, or insertions, e.g., conservative substitutions) to the amino acid sequence of SEQ ID NO: 7018. In some embodiments, the cytokine molecule (e.g., IL-15) and the receptor dimerizing domain (e.g., an IL15Ralpha dimerizing domain) of the multispecific molecule are covalently linked, e.g., via a linker (e.g., a Gly-Ser linker, e.g., a linker comprising the amino acid sequence SGGSGGGGSGGGSGGGGSLQ (SEQ ID NO: 7019). In other embodiments, the cytokine molecule (e.g., IL-15) and the receptor dimerizing domain (e.g., an IL15Ralpha dimerizing domain) of the multispecific molecule are not covalently linked, e.g., are non-covalently associated.

[0771] In other embodiments, the cytokine molecule is IL-2, e.g., human IL-2 (e.g., comprising the amino acid sequence: APTSSSTKKTQLQLEHLLLDLQMILNGINNYKNPKLTRMLTFKFYMPKKATELKHLQCL EEELKPLEEVLNLAQSKNFHLRPRDLISNINVIVLELKGSETTFMCEYADETATIVEFLNR WITFCQSIISTLT (SEQ ID NO: 7020), a fragment thereof, or an amino acid sequence substantially identical thereto (e.g., 95% to 99.9% identical thereto, or having at least one amino acid alteration, but not more than five, ten or fifteen alterations (e.g., substitutions, deletions, or insertions, e.g., conservative substitutions) to the amino acid sequence of SEQ ID NO: 7020).

[0772] In other embodiments, the cytokine molecule is IL-18, e.g., human IL-18 (e.g., comprising the amino acid sequence: YFGKLESKLSVIRNLNDQVLFIDQGNRPLFEDMTDSDCRDNAPRTIFIISMYKDSQPRGM AVTISVKCEKISTLSCENKIISFKEMNPPDNIKDTKSDIIFFQRSVPGHDNKMQFESSSYEG YFLACEKERDLFKLILKKEDELGDRSIMFTVQNED (SEQ ID NO: 7021), a fragment thereof, or an amino acid sequence substantially identical thereto (e.g., 95% to 99.9% identical thereto, or having at least one amino acid alteration, but not more than five, ten or fifteen alterations (e.g., substitutions, deletions, or insertions, e.g., conservative substitutions) to the amino acid sequence of SEQ ID NO: 7021).

[0773] In other embodiments, the cytokine molecule is IL-21, e.g., human IL-21 (e.g., comprising the amino acid sequence: QGQDRHMIRMRQLIDIVDQLKNYVNDLVPEFLPAPEDVETNCEWSAFSCFQKAQLKSA NTGNNERIINVSIKKLKRKPPSTNAGRRQKHRLTCPSCDSYEKKPPKEFLERFKSLLQKMI HQHLSSRTHGSEDS (SEQ ID NO: 7022), a fragment thereof, or an amino acid sequence substantially identical thereto (e.g., 95% to 99.9% identical thereto, or having at least one amino acid alteration, but not more than five, ten or fifteen alterations (e.g., substitutions, deletions, or insertions, e.g., conservative substitutions) to the amino acid sequence of SEQ ID NO: 7022).

[0774] In yet other embodiments, the cytokine molecule is interferon gamma, e.g., human interferon gamma (e.g., comprising the amino acid sequence: QDPYVKEAENLKKYFNAGHSDVADNGTLFLGILKNWKEESDRKIIVIQSQIVSFYFKLFK NFKDDQSIQKSVETIKEDMNVKFFNSNKKKRDDFEKLTNYSVTDLNVQRKAIHELIQVM AELSPAAKTGKRKRSQMLFRG (SEQ ID NO: 7023), a fragment thereof, or an amino acid sequence substantially identical thereto (e.g., 95% to 99.9% identical thereto, or having at least one amino acid alteration, but not more than five, ten or fifteen alterations (e.g., substitutions, deletions, or insertions, e.g., conservative substitutions) to the amino acid sequence of SEQ ID NO: 7023).

### TGF-Beta Inhibitors

[0775] The present disclosure further provides, inter alia, multispecific (e.g., bi-, tri-, quad-specific) or multifunctional molecules, that include, e.g., are engineered to contain, one or more cytokine inhibitor molecules, e.g., inhibitors of immunomodulatory (e.g., proinflammatory) cytokines and variants, e.g., functional variants, thereof. Accordingly, in some embodiments, the cytokine inhibitor molecule is a TGF-beta inhibitor. In some embodiments, the TGF-beta inhibitor binds to and inhibits TGF-beta, e.g., reduces the activity of TGF-beta. In some embodiments, the TGF-beta inhibitor inhibits (e.g., reduces the activity of) TGF-beta 1. In some embodiments, the TGF-beta inhibitor inhibits (e.g., reduces the activity of) TGF-beta 2. In some embodiments, the TGF-beta inhibitor inhibits (e.g., reduces the activity of) TGF-beta 3. In some embodiments, the TGF-beta inhibitor inhibits (e.g., reduces the activity of) TGF-beta 1 and TGF-beta 3. In some embodiments, the TGF-beta inhibitor inhibits (e.g., reduces the activity of) TGF-beta 1, TGF-beta 2, and TGF-beta 3.

[0776] In some embodiments, the TGF-beta inhibitor comprises a portion of a TGF-beta receptor (e.g., an extracellular domain of a TGF-beta receptor) that is capable of inhibiting (e.g., reducing the activity of) TGF-beta, or functional fragment or variant thereof. In some embodiments, the TGF-beta inhibitor comprises a TGFBR1 polypeptide (e.g., an extracellular domain of TGFBR1 or functional variant thereof). In some embodiments, the TGF-beta inhibitor comprises a TGFBR2 polypeptide (e.g., an extracellular domain of TGFBR2 or functional variant thereof). In some embodiments, the TGF-beta inhibitor comprises a TGFBR3 polypeptide (e.g., an extracellular domain of TGFBR3 or functional variant thereof). In some embodiments, the TGF-beta inhibitor comprises a TGFBR1 polypeptide (e.g., an extracellular domain of TGFBR1 or functional variant thereof) and a TGFBR2 polypeptide (e.g., an extracellular domain of TGFBR2 or functional variant thereof). In some embodiments, the TGF-beta inhibitor comprises a TGFBR1 polypeptide (e.g., an extracellular domain of TGFBR1 or functional variant thereof) and a TGFBR3 polypeptide (e.g., an extracellular domain of TGFBR3 or functional variant thereof). In some embodiments, the TGF-beta inhibitor comprises a TGFBR2 polypeptide (e.g., an extracellular domain of TGFBR2 or functional variant thereof) and a TGFBR3 polypeptide (e.g., an extracellular domain of TGFBR3 or functional variant thereof).

[0777] Exemplary TGF-beta receptor polypeptides that can be used as TGF-beta inhibitors have been disclosed in U.S. Pat. Nos. 8,993,524, 9,676,863, 8,658,135, US20150056199, US20070184052, and WO2017037634, all of which are herein incorporated by reference in their entirety.

[0778] In some embodiments, the TGF-beta inhibitor comprises an extracellular domain of TGFBR1 or a sequence substantially identical thereto (e.g., a sequence that is at least 80%, 85%, 90%, or 95% identical thereto). In some embodiments, the TGF-beta inhibitor comprises an extracellular domain of SEQ ID NO: 7257, or a sequence substantially identical thereto (e.g., a sequence that is at least 80%, 85%, 90%, or 95% identical thereto). In some embodiments, the TGF-beta inhibitor comprises an extracellular domain of SEQ ID NO: 7258, or a sequence substantially identical thereto (e.g., a sequence that is at least 80%, 85%, 90%, or 95% identical thereto). In some embodiments, the TGF-beta inhibitor comprises an extracellular domain of SEQ ID NO: 7259, or a sequence substantially identical thereto (e.g., a sequence that is at least 80%, 85%, 90%, or 95% identical thereto). In some embodiments, the TGF-beta inhibitor comprises the amino acid sequence of SEQ ID NO: 7266, or a sequence substantially identical thereto (e.g., a sequence that is at least 80%, 85%, 90%, or 95% identical thereto). In some embodiments, the TGF-beta inhibitor comprises the amino acid sequence of SEQ ID NO: 7267, or a sequence substantially identical thereto (e.g., a sequence that is at least 80%, 85%, 90%, or 95% identical thereto).

[0779] In some embodiments, the TGF-beta inhibitor comprises an extracellular domain of TGFBR2 or a sequence substantially identical thereto (e.g., a sequence that is at least 80%, 85%, 90%, or 95% identical thereto). In some embodiments, the TGF-beta inhibitor comprises an extracellular domain of SEQ ID NO: 7260, or a sequence substantially identical thereto (e.g., a sequence that is at least 80%, 85%, 90%, or 95% identical thereto). In some embodiments, the TGF-beta inhibitor comprises an extracellular domain of SEQ ID NO: 7261, or a sequence substantially identical thereto (e.g., a sequence that is at least 80%, 85%, 90%, or 95% identical thereto). In some embodiments, the TGF-beta inhibitor comprises the amino acid sequence of SEQ ID NO: 7262, or a sequence substantially identical thereto (e.g., a sequence that is at least 80%, 85%, 90%, or 95% identical thereto). In some embodiments, the TGF-beta inhibitor comprises the amino acid sequence of SEQ ID NO: 7263, or a sequence substantially identical thereto (e.g., a sequence that is at least 80%, 85%, 90%, or 95% identical thereto). In some embodiments, the TGF-beta inhibitor comprises the amino acid sequence of SEQ ID NO: 7264, or a sequence substantially identical thereto (e.g., a sequence that is at least 80%, 85%, 90%, or 95% identical thereto). In some embodiments, the TGF-beta inhibitor comprises the amino acid sequence of SEQ ID NO: 7265, or a sequence substantially identical thereto (e.g., a sequence that is at least 80%, 85%, 90%, or 95% identical thereto).

[0780] In some embodiments, the TGF-beta inhibitor comprises an extracellular domain of TGFBR3 or a sequence substantially identical thereto (e.g., a sequence that is at least 80%, 85%, 90%, or 95% identical thereto). In some embodiments, the TGF-beta inhibitor comprises an extracellular domain of SEQ ID NO: 7268, or a sequence substantially identical thereto (e.g., a sequence that is at least 80%, 85%, 90%, or 95% identical thereto). In some embodiments, the TGF-beta inhibitor comprises an extracellular domain of SEQ ID NO: 7269, or a sequence substantially identical thereto (e.g., a sequence that is at least 80%, 85%, 90%, or 95% identical thereto). In some embodiments, the TGF-beta inhibitor comprises the amino acid sequence of SEQ ID NO: 7270, or a sequence substantially identical thereto (e.g., a sequence that is at least 80%, 85%, 90%, or 95% identical thereto).

[0781] In some embodiments, the TGF-beta inhibitor comprises no more than one TGF-beta receptor extracellular domain. In some embodiments, the TGF-beta inhibitor comprises two or more (e.g., two, three, four, five, or more) TGF-beta receptor extracellular domains, linked together, e.g., via a linker.

TABLE 16
Exemplary amino acid sequences of TGF-beta polypeptides or TGF-beta receptor
polypeptides

| SEQ ID NO | Description | Amino acid sequence |
|---|---|---|
| SEQ ID NO: | Immature human | MPPSGLRLLLLLLPLLWLLVLTPGRPAAGLSTCKTIDMELV |
| 7254 | TGF-beta 1 | KRKRIEAIRGQILSKLRLASPPSQGEVPPGPLPEAVLALYNS |
| | (P01137-1) | TRDRVAGESAEPEPEPEADYYAKEVTRVLMVETHNEIYDK |
| | | FKQSTHSIYMFFNTSELREAVPEPVLLSRAELRLLRLKLKVE |
| | | QHVELYQKYSNNSWRYLSNRLLAPSDSPEWLSFDVTGVVR |
| | | QWLSRGGEIEGFRLSAHCSCDSRDNTLQVDINGFTTGRRGD |
| | | LATIHGMNRPFLLLMATPLERAQHLQSSRHRRALDTNYCF |
| | | SSTEKNCCVRQLYIDFRKDLGWKWIHEPKGYHANFCLGPC |
| | | PYIWSLDTQYSKVLALYNQHNPGASAAPCCVPQALEPLPIV |
| | | YYVGRKPKVEQLSNMIVRSCKCS |
| SEQ ID NO: | Human TGF-beta | LSTCKTIDMELVKRKRIEAIRGQILSKLRLASPPSQGEVPPGP |
| 7271 | 1 (P01137-1) | LPEAVLALYNSTRDRVAGESAEPEPEPEADYYAKEVTRVL |
| | | MVETHNEIYDKFKQSTHSIYMFFNTSELREAVPEPVLLSRA |
| | | ELRLLRLKLKVEQHVELYQKYSNNSWRYLSNRLLAPSDSP |
| | | EWLSFDVTGVVRQWLSRGGEIEGFRLSAHCSCDSRDNTLQ |
| | | VDINGFTTGRRGDLATIHGMNRPFLLLMATPLERAQHLQSS |
| | | RHRRALDTNYCFSSTEKNCCVRQLYIDFRKDLGWKWIHEP |
| | | KGYHANFCLGPCPYIWSLDTQYSKVLALYNQHNPGASAAP |
| | | CCVPQALEPLPIVYYVGRKPKVEQLSNMIVRSCKCS |
| SEQ ID NO: | Immature human | MHYCVLSAFLILHLVTVALSLSTCSTLDMDQFMRKRIEAIR |
| 7255 | TGF-beta 2 | GQILSKLKLTSPPEDYPEPEEVPPEVISIYNSTRDLLQEKASR |
| | (P61812-1) | RAAACERERSDEEYYAKEVYKIDMPPFFPSENAIPPTFYRP |
| | | YFRIVRFDVSAMEKNASNLVKAEFRVFRLQNPKARVPEQRI |
| | | ELYQILKSKDLTSPTQRYIDSKVVKTRAEGEWLSFDVTDAV |
| | | HEWLHHKDRNLGFKISLHCPCCTFVPSNNYIIPNKSEELEAR |
| | | FAGIDGTSTYTSGDQKTIKSTRKKNSGKTPHLLLMLLPSYR |
| | | LESQQTNRRKKRALDAAYCFRNVQDNCCLRPLYIDFKRDL |
| | | GWKWIHEPKGYNANFCAGACPYLWSSDTQHSRVLSLYNTI |
| | | NPEASASPCCVSQDLEPLTILYYIGKTPKIEQLSNMIVKSCK |
| | | CS |
| SEQ ID NO: | Human TGF-beta | LSTCSTLDMDQFMRKRIEAIRGQILSKLKLTSPPEDYPEPEE |
| 7272 | 2 (P61812-1) | VPPEVISIYNSTRDLLQEKASRRAAACERERSDEEYYAKEV |
| | | YKIDMPPFFPSENAIPPTFYRPYFRIVRFDVSAMEKNASNLV |
| | | KAEFRVFRLQNPKARVPEQRIELYQILKSKDLTSPTQRYIDS |
| | | KVVKTRAEGEWLSFDVTDAVHEWLHHKDRNLGFKISLHC |
| | | PCCTFVPSNNYIIPNKSEELEARFAGIDGTSTYTSGDQKTIKS |
| | | TRKKNSGKTPHLLLMLLPSYRLESQQTNRRKKRALDAAYC |
| | | FRNVQDNCCLRPLYIDFKRDLGWKWIHEPKGYNANFCAG |
| | | ACPYLWSSDTQHSRVLSLYNTINPEASASPCCVSQDLEPLTI |
| | | LYYIGKTPKIEQLSNMIVKSCKCS |
| SEQ ID NO: | Immature human | MKMHLQRALVVLALLNFATVSLSLSTCTTLDFGHIKKKRV |
| 7256 | TGF-beta 3 | EAIRGQILSKLRLTSPPEPTVMTHVPYQVLALYNSTRELLEE |
| | (P10600-1) | MHGEREEGCTQENTESEYYAKEIHKFDMIQGLAEHNELAV |
| | | CPKGITSKVFRFNVSSVEKNRTNLFRAEFRVLRVPNPSSKR |
| | | NEQRIELFQILRPDEHIAKQRYIGGKNLPTRGTAEWLSFDVT |
| | | DTVREWLLRRESNLGLEISIHCPCHTFQPNGDILENIHEVME |
| | | IKFKGVDNEDDHGRGDLGRLKKQKDHHNPHLILMMIPPHR |
| | | LDNPGQGGQRKKRALDTNYCFRNLEENCCVRPLYIDFRQD |
| | | LGWKWVHEPKGYYANFCSGPCPYLRSADTTHSTVLGLYN |
| | | TLNPEASASPCCVPQDLEPLTILYYVGRTPKVEQLSNMVVK |
| | | SCKCS |
| SEQ ID NO: | Human TGF-beta | LSTCTTLDFGHIKKKRVEAIRGQILSKLRLTSPPEPTVMTHV |
| 7273 | 3 (P10600-1) | PYQVLALYNSTRELLEEMHGEREEGCTQENTESEYYAKEI |
| | | HKFDMIQGLAEHNELAVCPKGITSKVFRFNVSSVEKNRTNL |
| | | FRAEFRVLRVPNPSSKRNEQRIELFQILRPDEHIAKQRYIGG |
| | | KNLPTRGTAEWLSFDVTDTVREWLLRRESNLGLEISIHCPC |
| | | HTFQPNGDILENIHEVMEIKFKGVDNEDDHGRGDLGRLKK |
| | | QKDHHNPHLILMMIPPHRLDNPGQGGQRKKRALDTNYCFR |
| | | NLEENCCVRPLYIDFRQDLGWKWVHEPKGYYANFCSGPCP |
| | | YLRSADTTHSTVLGLYNTLNPEASASPCCVPQDLEPLTILY |
| | | YVGRTPKVEQLSNMVVKSCKCS |
| SEQ ID NO: | Immature human | MEAAVAAPRPRLLLLVLAAAAAAAAALLPGATALQCFCH |
| 7257 | TGFBR1 isoform | LCTKDNFTCVTDGLCFVSVTETTDKVIHNSMCIAEIDLIPRD |
| | 1 (P36897-1) | RPFVCAPSSKTGSVTTTYCCNQDHCNKIELPTTVKSSPGLG |
| | | PVELAAVIAGPVCFVCISLMLMVYICHNRTVIHHRVPNEED |
| | | PSLDRPFISEGTTLKDLIYDMTTSGSGSGLPLLVQRTIARTIV |
| | | LQESIGKGRFGEVWRGKWRGEEVAVKIFSSREERSWFREA |
| | | EIYQTVMLRHENILGFIAADNKDNGTWTQLWLVSDYHEH |
| | | GSLFDYLNRYTVTVEGMIKLALSTASGLAHLHMEIVGTQG |
| | | KPAIAHRDLKSKNILVKKNGTCCIADLGLAVRHDSATDTID |
| | | IAPNHRVGTKRYMAPEVLDDSINMKHFESFKRADIYAMGL |
| | | VFWEIARRCSIGGIHEDYQLPYYDLVPSDPSVEEMRKVVCE |
| | | QKLRPNIPNRWQSCEALRVMAKIMRECWYANGAARLTAL |
| | | RIKKTLSQLSQQEGIKM |
| SEQ ID NO: | Human TGFBR1 | LQCFCHLCTKDNFTCVTDGLCFVSVTETTDKVIHNSMCIAE |
| 7274 | isoform 1 | IDLIPRDRPFVCAPSSKTGSVTTTYCCNQDHCNKIELPTTVK |
| | (P36897-1) | SSPGLGPVELAAVIAGPVCFVCISLMLMVYICHNRTVIHHR |
| | | VPNEEDPSLDRPFISEGTTLKDLIYDMTTSGSGSGLPLLVQR |
| | | TIARTIVLQESIGKGRFGEVWRGKWRGEEVAVKIFSSREER |
| | | SWFREAEIYQTVMLRHENILGFIAADNKDNGTWTQLWLVS |
| | | DYHEHGSLFDYLNRYTVTVEGMIKLALSTASGLAHLHMEI |
| | | VGTQGKPAIAHRDLKSKNILVKKNGTCCIADLGLAVRHDS |
| | | ATDTIDIAPNHRVGTKRYMAPEVLDDSINMKHFESFKRADI |
| | | YAMGLVFWEIARRCSIGGIHEDYQLPYYDLVPSDPSVEEM |
| | | RKVVCEQKLRPNIPNRWQSCEALRVMAKIMRECWYANGA |
| | | ARLTALRIKKTLSQLSQQEGIKM |
| SEQ ID NO: | Immature human | MEAAVAAPRPRLLLLVLAAAAAAAAALLPGATALQCFCH |
| 7258 | TGFBR1 isoform | LCTKDNFTCVTDGLCFVSVTETTDKVIHNSMCIAEIDLIPRD |
| | 2 (P36897-2) | RPFVCAPSSKTGSVTTTYCCNQDHCNKIELPTTGPFSVKSSP |
| | | GLGPVELAAVIAGPVCFVCISLMLMVYICHNRTVIHHRVPN |
| | | EEDPSLDRPFISEGTTLKDLIYDMTTSGSGSGLPLLVQRTIA |
| | | RTIVLQESIGKGRFGEVWRGKWRGEEVAVKIFSSREERSWF |
| | | REAEIYQTVMLRHENILGFIAADNKDNGTWTQLWLVSDYH |
| | | EHGSLFDYLNRYTVTVEGMIKLALSTASGLAHLHMEIVGT |
| | | QGKPAIAHRDLKSKNILVKKNGTCCIADLGLAVRHDSATD |
| | | TIDIAPNHRVGTKRYMAPEVLDDSINMKHFESFKRADIYA |
| | | MGLVFWEIARRCSIGGIHEDYQLPYYDLVPSDPSVEEMRK |
| | | VVCEQKLRPNIPNRWQSCEALRVMAKIMRECWYANGAAR |
| | | LTALRIKKTLSQLSQQEGIKM |
| SEQ ID NO: | Human TGFBR1 | LQCFCHLCTKDNFTCVTDGLCFVSVTETTDKVIHNSMCIAE |
| 7275 | isoform 2 | IDLIPRDRPFVCAPSSKTGSVTTTYCCNQDHCNKIELPTTGP |
| | (P36897-2) | FSVKSSPGLGPVELAAVIAGPVCFVCISLMLMVYICHNRTVI |
| | | HHRVPNEEDPSLDRPFISEGTTLKDLIYDMTTSGSGSGLPLL |
| | | VQRTIARTIVLQESIGKGRFGEVWRGKWRGEEVAVKIFSSR |
| | | EERSWFREAEIYQTVMLRHENILGFIAADNKDNGTWTQLW |
| | | LVSDYHEHGSLFDYLNRYTVTVEGMIKLALSTASGLAHLH |
| | | MEIVGTQGKPAIAHRDLKSKNILVKKNGTCCIADLGLAVR |
| | | HDSATDTIDIAPNHRVGTKRYMAPEVLDDSINMKHFESFKR |
| | | ADIYAMGLVFWEIARRCSIGGIHEDYQLPYYDLVPSDPSVE |
| | | EMRKVVCEQKLRPNIPNRWQSCEALRVMAKIMRECWYAN |
| | | GAARLTALRIKKTLSQLSQQEGIKM |
| SEQ ID NO: | Immature human | MEAAVAAPRPRLLLLVLAAAAAAAAALLPGATALQCFCH |
| 7259 | TGFBR1 isoform | LCTKDNFTCVTDGLCFVSVTETTDKVIHNSMCIAEIDLIPRD |
| | 3 (P36897-3) | RPFVCAPSSKTGSVTTTYCCNQDHCNKIELPTTGLPLLVQR |
| | | TIARTIVLQESIGKGRFGEVWRGKWRGEEVAVKIFSSREER |
| | | SWFREAEIYQTVMLRHENILGFIAADNKDNGTWTQLWLVS |
| | | DYHEHGSLFDYLNRYTVTVEGMIKLALSTASGLAHLHMEI |
| | | VGTQGKPAIAHRDLKSKNILVKKNGTCCIADLGLAVRHDS |
| | | ATDTIDIAPNHRVGTKRYMAPEVLDDSINMKHFESFKRADI |
| | | YAMGLVFWEIARRCSIGGIHEDYQLPYYDLVPSDPSVEEM |
| | | RKVVCEQKLRPNIPNRWQSCEALRVMAKIMRECWYANGA |
| | | ARLTALRIKKTLSQLSQQEGIKM |
| SEQ ID NO: | Human TGFBR1 | LQCFCHLCTKDNFTCVTDGLCFVSVTETTDKVIHNSMCIAE |
| 7276 | isoform 3 | IDLIPRDRPFVCAPSSKTGSVTTTYCCNQDHCNKIELPTTGL |
| | (P36897-3) | PLLVQRTIARTIVLQESIGKGRFGEVWRGKWRGEEVAVKIF |
| | | SSREERSWFREAEIYQTVMLRHENILGFIAADNKDNGTWT |
| | | QLWLVSDYHEHGSLFDYLNRYTVTVEGMIKLALSTASGLA |
| | | HLHMEIVGTQGKPAIAHRDLKSKNILVKKNGTCCIADLGL |
| | | AVRHDSATDTIDIAPNHRVGTKRYMAPEVLDDSINMKHFE |
| | | SFKRADIYAMGLVFWEIARRCSIGGIHEDYQLPYYDLVPSD |
| | | PSVEEMRKVVCEQKLRPNIPNRWQSCEALRVMAKIMREC |
| | | WYANGAARLTALRIKKTLSQLSQQEGIKM |
| SEQ ID NO: | Human TGFBR1 | LQCFCHLCTKDNFTCVTDGLCFVSVTETTDKVIHNSMCIAE |
| 7266 | fragment 1 | IDLIPRDRPFVCAPSSKTGSVTTTYCCNQDHCNKIELPTTVK |
| | | SSPGLGPVEL |
| SEQ ID NO: | Human TGFBR1 | ALQCFCHLCTKDNFTCVTDGLCFVSVTETTDKVIHNSMCIA |
| 7267 | fragment 2 | EIDLIPRDRPFVCAPSSKTGSVTTTYCCNQDHCNKIEL |
| SEQ ID NO: | Immature human | MGRGLLRGLWPLHIVLWTRIASTIPPHVQKSVNNDMIVTD |
| 7260 | TGFBR2 isoform | NNGAVKFPQLCKFCDVRFSTCDNQKSCMSNCSITSICEKPQ |
| | B (short isoform) | EVCVAVWRKNDENITLETVCHDPKLPYHDFILEDAASPKCI |
| | (P37173-1) | MKEKKKPGETFFMCSCSSDECNDNIIFSEEYNTSNPDLLLVI |
| | | FQVTGISLLPPLGVAISVIIIFYCYRVNRQQKLSSTWETGKTR |
| | | KLMEFSEHCAIILEDDRSDISSTCANNINHNTELLPIELDTLV |
| | | GKGRFAEVYKAKLKQNTSEQFETVAVKIFPYEEYASWKTE |
| | | KDIFSDINLKHENILQFLTAEERKTELGKQYWLITAFHAKG |
| | | NLQEYLTRHVISWEDLRKLGSSLARGIAHLHSDHTPCGRPK |
| | | MPIVHRDLKSSNILVKNDLTCCLCDFGLSLRLDPTLSVDDL |
| | | ANSGQVGTARYMAPEVLESRMNLENVESFKQTDVYSMAL |
| | | VLWEMTSRCNAVGEVKDYEPPFGSKVREHPCVESMKDNV |
| | | LRDRGRPEIPSFWLNHQGIQMVCETLTECWDHDPEARLTA |
| | | QCVAERFSELEHLDRLSGRSCSEEKIPEDGSLNTTK |
| SEQ ID NO: | Human TGFBR2 | TIPPHVQKSVNNDMIVTDNNGAVKFPQLCKFCDVRFSTCD |
| 7277 | isoform B (short | NQKSCMSNCSITSICEKPQEVCVAVWRKNDENITLETVCHD |
| | isoform) | PKLPYHDFILEDAASPKCIMKEKKKPGETFFMCSCSSDECN |
| | (P37173-1) | DNIIFSEEYNTSNPDLLLVIFQVTGISLLPPLGVAISVIIIFYCY |
| | | RVNRQQKLSSTWETGKTRKLMEFSEHCAIILEDDRSDISST |
| | | CANNINHNTELLPIELDTLVGKGRFAEVYKAKLKQNTSEQF |
| | | ETVAVKIFPYEEYASWKTEKDIFSDINLKHENILQFLTAEER |
| | | KTELGKQYWLITAFHAKGNLQEYLTRHVISWEDLRKLGSS |
| | | LARGIAHLHSDHTPCGRPKMPIVHRDLKSSNILVKNDLTCC |
| | | LCDFGLSLRLDPTLSVDDLANSGQVGTARYMAPEVLESRM |
| | | NLENVESFKQTDVYSMALVLWEMTSRCNAVGEVKDYEPP |
| | | FGSKVREHPCVESMKDNVLRDRGRPEIPSFWLNHQGIQMV |
| | | CETLTECWDHDPEARLTAQCVAERFSELEHLDRLSGRSCSE |
| | | EKIPEDGSLNTTK |
| SEQ ID NO: | Immature human | MGRGLLRGLWPLHIVLWTRIASTIPPHVQKSDVEMEAQKD |
| 7261 | TGFBR2 isoform | EIICPSCNRTAHPLRHINNDMIVTDNNGAVKFPQLCKFCDV |
| | A (long isoform) | RFSTCDNQKSCMSNCSITSICEKPQEVCVAVWRKNDENITL |
| | (P37173-2) | ETVCHDPKLPYHDFILEDAASPKCIMKEKKKPGETFFMCSC |
| | | SSDECNDNIIFSEEYNTSNPDLLLVIFQVTGISLLPPLGVAISV |
| | | IIIFYCYRVNRQQKLSSTWETGKTRKLMEFSEHCAIILEDDR |
| | | SDISSTCANNINHNTELLPIELDTLVGKGRFAEVYKAKLKQ |
| | | NTSEQFETVAVKIFPYEEYASWKTEKDIFSDINLKHENILQF |
| | | LTAEERKTELGKQYWLITAFHAKGNLQEYLTRHVISWEDL |
| | | RKLGSSLARGIAHLHSDHTPCGRPKMPIVHRDLKSSNILVK |
| | | NDLTCCLCDFGLSLRLDPTLSVDDLANSGQVGTARYMAPE |
| | | VLESRMNLENVESFKQTDVYSMALVLWEMTSRCNAVGEV |
| | | KDYEPPFGSKVREHPCVESMKDNVLRDRGRPEIPSFWLNH |
| | | QGIQMVCETLTECWDHDPEARLTAQCVAERFSELEHLDRL |
| | | SGRSCSEEKIPEDGSLNTTK |
| SEQ ID NO: | Human TGFBR2 | TIPPHVQKSDVEMEAQKDEIICPSCNRTAHPLRHINNDMIVT |
| 7278 | isoform A (long | DNNGAVKFPQLCKFCDVRFSTCDNQKSCMSNCSITSICEKP |
| | isoform) | QEVCVAVWRKNDENITLETVCHDPKLPYHDFILEDAASPK |
| | (P37173-2) | CIMKEKKKPGETFFMCSCSSDECNDNIIFSEEYNTSNPDLLL |
| | | VIFQVTGISLLPPLGVAISVIIIFYCYRVNRQQKLSSTWETGK |
| | | TRKLMEFSEHCAIILEDDRSDISSTCANNINHNTELLPIELDT |
| | | LVGKGRFAEVYKAKLKQNTSEQFETVAVKIFPYEEYASWK |
| | | TEKDIFSDINLKHENILQFLTAEERKTELGKQYWLITAFHAK |
| | | GNLQEYLTRHVISWEDLRKLGSSLARGIAHLHSDHTPCGRP |
| | | KMPIVHRDLKSSNILVKNDLTCCLCDFGLSLRLDPTLSVDD |
| | | LANSGQVGTARYMAPEVLESRMNLENVESFKQTDVYSMA |
| | | LVLWEMTSRCNAVGEVKDYEPPFGSKVREHPCVESMKDN |
| | | VLRDRGRPEIPSFWLNHQGIQMVCETLTECWDHDPEARLT |
| | | AQCVAERFSELEHLDRLSGRSCSEEKIPEDGSLNTTK |
| SEQ ID NO: | Human TGFBR2 | TIPPHVQKSVNNDMIVTDNNGAVKFPQLCKFCDVRFSTCD |
| 7262 | fragment 1 (ECD | NQKSCMSNCSITSICEKPQEVCVAVWRKNDENITLETVCHD |
| | of human | PKLPYHDFILEDAASPKCIMKEKKKPGETFFMCSCSSDECN |
| | TGFBR2 isoform | DNIIFSEEYNTSNPD |
| | B) | |
| SEQ ID NO: | Human TGFBR2 | IPPHVQKSVNNDMIVTDNNGAVKFPQLCKFCDVRFSTCDN |
| 7263 | fragment 2 | QKSCMSNCSITSICEKPQEVCVAVWRKNDENITLETVCHDP |
| | | KLPYHDFILEDAASPKCIMKEKKKPGETFFMCSCSSDECND |
| | | NIIFSEEYNTSNPD |
| SEQ ID NO: | Human TGFBR2 | TIPPHVQKSDVEMEAQKDEIICPSCNRTAHPLRHINNDMIVT |
| 7264 | fragment 3 (ECD | DNNGAVKFPQLCKFCDVRFSTCDNQKSCMSNCSITSICEKP |
| | of human | QEVCVAVWRKNDENITLETVCHDPKLPYHDFILEDAASPK |
| | TGFBR2 isoform | CIMKEKKKPGETFFMCSCSSDECNDNIIFSEEYNTSNPD |
| | A) | |
| SEQ ID NO: | Human TGFBR2 | QLCKFCDVRFSTCDNQKSCMSNCSITSICEKPQEVCVAVW |
| 7265 | fragment 4 | RKNDENITLETVCHDPKLPYHDFILEDAASPKCIMKEKKKP |
| | | GETFFMCSCSSDECNDNIIF |
| SEQ ID NO: | Immature human | MTSHYVIAIFALMSSCLATAGPEPGALCELSPVSASHPVQA |
| 7268 | TGFBR3 isoform | LMESFTVLSGCASRGTTGLPQEVHVLNLRTAGQGPGQLQR |
| | 1 (Q03167-1) | EVTLHLNPISSVHIHHKSVVFLLNSPHPLVWHLKTERLATG |
| | | VSRLFLVSEGSVVQFSSANFSLTAETEERNFPHGNEHLLNW |
| | | ARKEYGAVTSFTELKIARNIYIKVGEDQVFPPKCNIGKNFLS |
| | | LNYLAEYLQPKAAEGCVMSSQPQNEEVHIIELITPNSNPYS |
| | | AFQVDITIDIRPSQEDLEVVKNLILILKCKKSVNWVIKSFDV |
| | | KGSLKIIAPNSIGFGKESERSMTMTKSIRDDIPSTQGNLVKW |
| | | ALDNGYSPITSYTMAPVANRFHLRLENNAEEMGDEEVHTI |
| | | PPELRILLDPGALPALQNPPIRGGEGQNGGLPFPFPDISRRV |
| | | WNEEGEDGLPRPKDPVIPSIQLFPGLREPEEVQGSVDIALSV |
| | | KCDNEKMIVAVEKDSFQASGYSGMDVTLLDPTCKAKMNG |
| | | THFVLESPLNGCGTRPRWSALDGVVYYNSIVIQVPALGDSS |
| | | GWPDGYEDLESGDNGFPGDMDEGDASLFTRPEIVVFNCSL |
| | | QQVRNPSSFQEQPHGNITFNMELYNTDLFLVPSQGVFSVPE |
| | | NGHVYVEVSVTKAEQELGFAIQTCFISPYSNPDRMSHYTIIE |
| | | NICPKDESVKFYSPKRVHFPIPQADMDKKRFSFVFKPVFNT |
| | | SLLFLQCELTLCTKMEKHPQKLPKCVPPDEACTSLDASIIW |
| | | AMMQNKKTFTKPLAVIHHEAESKEKGPSMKEPNPISPPIFH |
| | | GLDTLTVMGIAFAAFVIGALLTGALWYWSHTGETAGRQQ |
| | | VPTSPPASENSSAAHSIGSTQSTPCSSSSTA |
| SEQ ID NO: | Human TGFBR3 | GPEPGALCELSPVSASHPVQALMESFTVLSGCASRGTTGLP |
| 7279 | isoform 1 | QEVHVLNLRTAGQGPGQLQREVTLHLNPISSVHIHHKSVVF |
| | (Q03167-1) | LLNSPHPLVWHLKTERLATGVSRLFLVSEGSVVQFSSANFS |
| | | LTAETEERNFPHGNEHLLNWARKEYGAVTSFTELKIARNIY |
| | | IKVGEDQVFPPKCNIGKNFLSLNYLAEYLQPKAAEGCVMSS |
| | | QPQNEEVHIIELITPNSNPYSAFQVDITIDIRPSQEDLEVVKN |
| | | LILILKCKKSVNWVIKSFDVKGSLKIIAPNSIGFGKESERSMT |
| | | MTKSIRDDIPSTQGNLVKWALDNGYSPITSYTMAPVANRF |
| | | HLRLENNAEEMGDEEVHTIPPELRILLDPGALPALQNPPIRG |
| | | GEGQNGGLPFPFPDISRRVWNEEGEDGLPRPKDPVIPSIQLF |
| | | PGLREPEEVQGSVDIALSVKCDNEKMIVAVEKDSFQASGYS |
| | | GMDVTLLDPTCKAKMNGTHFVLESPLNGCGTRPRWSALD |
| | | GVVYYNSIVIQVPALGDSSGWPDGYEDLESGDNGFPGDMD |
| | | EGDASLFTRPEIVVFNCSLQQVRNPSSFQEQPHGNITFNMEL |
| | | YNTDLFLVPSQGVFSVPENGHVYVEVSVTKAEQELGFAIQT |
| | | CFISPYSNPDRMSHYTIIENICPKDESVKFYSPKRVHFPIPQA |
| | | DMDKKRFSFVFKPVFNTSLLFLQCELTLCTKMEKHPQKLP |
| | | KCVPPDEACTSLDASIIWAMMQNKKTFTKPLAVIHHEAES |
| | | KEKGPSMKEPNPISPPIFHGLDTLTVMGIAFAAFVIGALLTG |
| | | ALWYIYSHTGETAGRQQVPTSPPASENSSAAHSIGSTQSTPC |
| | | SSSSTA |
| SEQ ID NO: | Immature human | MTSHYVIAIFALMSSCLATAGPEPGALCELSPVSASHPVQA |
| 7269 | TGFBR3 isoform | LMESFTVLSGCASRGTTGLPQEVHVLNLRTAGQGPGQLQR |
| | 2 (Q03167-2) | EVTLHLNPISSVHIHHKSVVFLLNSPHPLVWHLKTERLATG |
| | | VSRLFLVSEGSVVQFSSANFSLTAETEERNFPHGNEHLLNW |
| | | ARKEYGAVTSFTELKIARNIYIKVGEDQVFPPKCNIGKNFLS |
| | | LNYLAEYLQPKAAEGCVMSSQPQNEEVHIIELITPNSNPYS |
| | | AFQVDITIDIRPSQEDLEVVKNLILILKCKKSVNWVIKSFDV |
| | | KGSLKIIAPNSIGFGKESERSMTMTKSIRDDIPSTQGNLVKW |
| | | ALDNGYSPITSYTMAPVANRFHLRLENNEEMGDEEVHTIPP |
| | | ELRILLDPGALPALQNPPIRGGEGQNGGLPFPFPDISRRVWN |
| | | EEGEDGLPRPKDPVIPSIQLFPGLREPEEVQGSVDIALSVKC |
| | | DNEKMIVAVEKDSFQASGYSGMDVTLLDPTCKAKMNGTH |
| | | FVLESPLNGCGTRPRWSALDGVVYYNSIVIQVPALGDSSG |
| | | WPDGYEDLESGDNGFPGDMDEGDASLFTRPEIVVFNCSLQ |
| | | QVRNPSSFQEQPHGNITFNMELYNTDLFLVPSQGVFSVPEN |
| | | GHVYVEVSVTKAEQELGFAIQTCFISPYSNPDRMSHYTIIEN |
| | | ICPKDESVKFYSPKRVHFPIPQADMDKKRFSFVFKPVFNTSL |
| | | LFLQCELTLCTKMEKHPQKLPKCVPPDEACTSLDASIIWAM |
| | | MQNKKTFTKPLAVIHHEAESKEKGPSMKEPNPISPPIFHGLD |
| | | TLTVMGIAFAAFVIGALLTGALWYIYSHTGETAGRQQVPTS |
| | | PPASENSSAAHSIGSTQSTPCSSSSTA |
| SEQ ID NO: | Human TGFBR3 | GPEPGALCELSPVSASHPVQALMESFTVLSGCASRGTTGLP |
| 7280 | isoform 2 | QEVHVLNLRTAGQGPGQLQREVTLHLNPISSVHIHHKSVVF |
| | (Q03167-2) | LLNSPHPLVWHLKTERLATGVSRLFLVSEGSVVQFSSANFS |
| | | LTAETEERNFPHGNEHLLNWARKEYGAVTSFTELKIARNIY |
| | | IKVGEDQVFPPKCNIGKNFLSLNYLAEYLQPKAAEGCVMSS |
| | | QPQNEEVHIIELITPNSNPYSAFQVDITIDIRPSQEDLEVVKN |
| | | LILILKCKKSVNWVIKSFDVKGSLKIIAPNSIGFGKESERSMT |
| | | MTKSIRDDIPSTQGNLVKWALDNGYSPITSYTMAPVANRF |
| | | HLRLENNEEMGDEEVHTIPPELRILLDPGALPALQNPPIRGG |
| | | EGQNGGLPFPFPDISRRVWNEEGEDGLPRPKDPVIPSIQLFP |
| | | GLREPEEVQGSVDIALSVKCDNEKMIVAVEKDSFQASGYS |
| | | GMDVTLLDPTCKAKMNGTHFVLESPLNGCGTRPRWSALD |
| | | GVVYYNSIVIQVPALGDSSGWPDGYEDLESGDNGFPGDMD |
| | | EGDASLFTRPEIVVFNCSLQQVRNPSSFQEQPHGNITFNMEL |
| | | YNTDLFLVPSQGVFSVPENGHVYVEVSVTKAEQELGFAIQT |
| | | CFISPYSNPDRMSHYTIIENICPKDESVKFYSPKRVHFPIPQA |
| | | DMDKKRFSFVFKPVFNTSLLFLQCELTLCTKMEKHPQKLP |
| | | KCVPPDEACTSLDASIIWAMMQNKKTFTKPLAVIHHEAES |
| | | KEKGPSMKEPNPISPPIFHGLDTLTVMGIAFAAFVIGALLTG |
| | | ALWYIYSHTGETAGRQQVPTSPPASENSSAAHSIGSTQSTPC |
| | | SSSSTA |
| SEQ ID NO: | Human TGFBR3 | GPEPGALCELSPVSASHPVQALMESFTVLSGCASRGTTGLP |
| 7270 | fragment 1 | QEVHVLNLRTAGQGPGQLQREVTLHLNPISSVHIHHKSVVF |
| | | LLNSPHPLVWHLKTERLATGVSRLFLVSEGSVVQFSSANFS |
| | | LTAETEERNFPHGNEHLLNWARKEYGAVTSFTELKIARNIY |
| | | IKVGEDQVFPPKCNIGKNFLSLNYLAEYLQPKAAEGCVMSS |
| | | QPQNEEVHIIELITPNSNPYSAFQVDITIDIRPSQEDLEVVKN |
| | | LILILKCKKSVNWVIKSFDVKGSLKIIAPNSIGFGKESERSMT |
| | | MTKSIRDDIPSTQGNLVKWALDNGYSPITSYTMAPVANRF |
| | | HLRLENNAEEMGDEEVHTIPPELRILLDPGALPALQNPPIRG |
| | | GEGQNGGLPFPFPDISRRVWNEEGEDGLPRPKDPVIPSIQLF |
| | | PGLREPEEVQGSVDIALSVKCDNEKMIVAVEKDSFQASGYS |
| | | GMDVTLLDPTCKAKMNGTHFVLESPLNGCGTRPRWSALD |
| | | GVVYYNSIVIQVPALGDSSGWPDGYEDLESGDNGFPGDMD |
| | | EGDASLFTRPEIVVFNCSLQQVRNPSSFQEQPHGNITFNMEL |
| | | YNTDLFLVPSQGVFSVPENGHVYVEVSVTKAEQELGFAIQT |
| | | CFISPYSNPDRMSHYTIIENICPKDESVKFYSPKRVHFPIPQA |
| | | DMDKKRFSFVFKPVFNTSLLFLQCELTLCTKMEKHPQKLP |
| | | KCVPPDEACTSLDASIIWAMMQNKKTFTKPLAVIHHEAES |
| | | KEKGPSMKEPNPISPPIFHGLDTLTV |
| SEQ ID NO: | hCH1-hFc_Hole- | ASTKGPSVFPLAPSSKSTSGGTAALGCLVKDYFPEPVTVSW |
| 7281 | 3x4GS-TGFbR2 | NSGALTSGVHTFPAVLQSSGLYSLSSVVTVPSSSLGTQTYIC |
| | | NVNHKPSNTKVDKRVEPKSCDKTHTCPPCPAPELLGGPSVF |
| | | LFPPKPKDTLMISRTPEVTCVVVDVSHEDPEVKFNWYVDG |
| | | VEVHNAKTKPREEQYNSTYRVVSVLTVLHQDWLNGKEYK |
| | | CKVSNKALPAPIEKTISKAKGQPREPQVCTLPPSREEMTKN |
| | | QVSLSCAVKGFYPSDIAVEWESNGQPENNYKTTPPVLDSD |
| | | GSFFLVSKLTVDKSRWQQGNVFSCSVMHEALHNHYTQKS |
| | | LSLSPGXGGGGSGGGGSGGGGSIPPHVQKSVNNDMIVTDN |
| | | NGAVKFPQLCKFCDVRFSTCDNQKSCMSNCSITSICEKPQE |
| | | VCVAVWRKNDENITLETVCHDPKLPYHDFILEDAASPKCI |
| | | MKEKKKPGETFFMCSCSSDECNDNIIFSEEYNTSNPD, |
| | | wherein X is K or absent |
| SEQ ID NO: | hCH1- | ASTKGPSVFPLAPSSKSTSGGTAALGCLVKDYFPEPVTVSW |
| 7282 | hFc_Knob- | NSGALTSGVHTFPAVLQSSGLYSLSSVVTVPSSSLGTQTYIC |
| | 3x4GS-TGFbR2 | NVNHKPSNTKVDKRVEPKSCDKTHTCPPCPAPELLGGPSVF |
| | | LFPPKPKDTLMISRTPEVTCVVVDVSHEDPEVKFNWYVDG |
| | | VEVHNAKTKPREEQYNSTYRVVSVLTVLHQDWLNGKEYK |
| | | CKVSNKALPAPIEKTISKAKGQPREPQVYTLPPCREEMTKN |
| | | QVSLWCLVKGFYPSDIAVEWESNGQPENNYKTTPPVLDSD |
| | | GSFFLYSKLTVDKSRWQQGNVFSCSVMHEALHNHYTQKS |
| | | LSLSPGXGGGGSGGGGSGGGGSIPPHVQKSVNNDMIVTDN |
| | | NGAVKFPQLCKFCDVRFSTCDNQKSCMSNCSITSICEKPQE |
| | | VCVAVWRKNDENITLETVCHDPKLPYHDFILEDAASPKCI |
| | | MKEKKKPGETFFMCSCSSDECNDNIIFSEEYNTSNPD, |
| | | wherein X is K or absent |
| SEQ ID NO: | hFc_Hole- | DKTHTCPPCPAPELLGGPSVFLFPPKPKDTLMISRTPEVTCV |
| 7283 | 3x4GS-TGFbR2 | VVDVSHEDPEVKFNWYVDGVEVHNAKTKPREEQYNSTYR |
| | | VVSVLTVLHQDWLNGKEYKCKVSNKALPAPIEKTISKAKG |
| | | QPREPQVCTLPPSREEMTKNQVSLSCAVKGFYPSDIAVEWE |
| | | SNGQPENNYKTTPPVLDSDGSFFLVSKLTVDKSRWQQGNV |
| | | FSCSVMHEALHNHYTQKSLSLSPGXGGGGSGGGGSGGGGS |
| | | IPPHVQKSVNNDMIVTDNNGAVKFPQLCKFCDVRFSTCDN |
| | | QKSCMSNCSITSICEKPQEVCVAVWRKNDENITLETVCHDP |
| | | KLPYHDFILEDAASPKCIMKEKKKPGETFFMCSCSSDECND |
| | | NIIFSEEYNTSNPD, wherein X is K or absent |
| SEQ ID NO: | hFc_Knob- | DKTHTCPPCPAPELLGGPSVFLFPPKPKDTLMISRTPEVTCV |
| 7284 | 3x4GS-TGFbR2 | VVDVSHEDPEVKFNWYVDGVEVHNAKTKPREEQYNSTYR |
| | | VVSVLTVLHQDWLNGKEYKCKVSNKALPAPIEKTISKAKG |
| | | QPREPQVYTLPPCREEMTKNQVSLWCLVKGFYPSDIAVEW |
| | | ESNGQPENNYKTTPPVLDSDGSFFLYSKLTVDKSRWQQGN |
| | | VFSCSVMHEALHNHYTQKSLSLSPGXGGGGSGGGGSGGG |
| | | GSIPPHVQKSVNNDMIVTDNNGAVKFPQLCKFCDVRFSTC |
| | | DNQKSCMSNCSITSICEKPQEVCVAVWRKNDENITLETVCH |
| | | DPKLPYHDFILEDAASPKCIMKEKKKPGETFFMCSCSSDEC |
| | | NDNIIFSEEYNTSNPD, wherein X is K or absent |
| SEQ ID NO: | TGFbR2-3x4GS- | IPPHVQKSVNNDMIVTDNNGAVKFPQLCKFCDVRFSTCDN |
| 7285 | hCH1-hFc_Hole | QKSCMSNCSITSICEKPQEVCVAVWRKNDENITLETVCHDP |
| | | KLPYHDFILEDAASPKCIMKEKKKPGETFFMCSCSSDECND |
| | | NIIFSEEYNTSNPDGGGGSGGGGSGGGGSASTKGPSVFPLA |
| | | PSSKSTSGGTAALGCLVKDYFPEPVTVSWNSGALTSGVHTF |
| | | PAVLQSSGLYSLSSVVTVPSSSLGTQTYICNVNHKPSNTKV |
| | | DKRVEPKSCDKTHTCPPCPAPELLGGPSVFLFPPKPKDTLMI |
| | | SRTPEVTCVVVDVSHEDPEVKFNWYVDGVEVHNAKTKPR |
| | | EEQYNSTYRVVSVLTVLHQDWLNGKEYKCKVSNKALPAPI |
| | | EKTISKAKGQPREPQVCTLPPSREEMTKNQVSLSCAVKGFY |
| | | PSDIAVEWESNGQPENNYKTTPPVLDSDGSFFLVSKLTVDK |
| | | SRWQQGNVFSCSVMHEALHNHYTQKSLSLSPGX, wherein |
| | | X is K or absent |
| SEQ ID NO: | TGFbR2-3x4GS- | IPPHVQKSVNNDMIVTDNNGAVKFPQLCKFCDVRFSTCDN |
| 7286 | hCH1-hFc_Knob | QKSCMSNCSITSICEKPQEVCVAVWRKNDENITLETVCHDP |
| | | KLPYHDFILEDAASPKCIMKEKKKPGETFFMCSCSSDECND |
| | | NIIFSEEYNTSNPDGGGGSGGGGSGGGGSASTKGPSVFPLA |
| | | PSSKSTSGGTAALGCLVKDYFPEPVTVSWNSGALTSGVHTF |
| | | PAVLQSSGLYSLSSVVTVPSSSLGTQTYICNVNHKPSNTKV |
| | | DKRVEPKSCDKTHTCPPCPAPELLGGPSVFLFPPKPKDTLMI |
| | | SRTPEVTCVVVDVSHEDPEVKFNWYVDGVEVHNAKTKPR |
| | | EEQYNSTYRVVSVLTVLHQDWLNGKEYKCKVSNKALPAPI |
| | | EKTISKAKGQPREPQVYTLPPCREEMTKNQVSLWCLVKGF |
| | | YPSDIAVEWESNGQPENNYKTTPPVLDSDGSFFLYSKLTVD |
| | | KSRWQQGNVFSCSVMHEALHNHYTQKSLSLSPGX, wherein |
| | | X is K or absent |
| SEQ ID NO: | TGFbR2-3x4GS- | IPPHVQKSVNNDMIVTDNNGAVKFPQLCKFCDVRFSTCDN |
| 7287 | hCLIg_v1 | QKSCMSNCSITSICEKPQEVCVAVWRKNDENITLETVCHDP |
| | | KLPYHDFILEDAASPKCIMKEKKKPGETFFMCSCSSDECND |
| | | NIIFSEEYNTSNPDGGGGSGGGGSGGGGSGQPKANPTVTLF |
| | | PPSSEELQANKATLVCLISDFYPGAVTVAWKADGSPVKAG |
| | | VETTKPSKQSNNKYAASSYLSLTPEQWKSHRSYSCQVTHE |
| | | GSTVEKTVAPTECS |
| SEQ ID NO: | TGFβR2-3x4GS- | IPPHVQKSVNNDMIVTDNNGAVKFPQLCKFCDVRFSTCDN |
| 7288 | hCLIg_vk | QKSCMSNCSITSICEKPQEVCVAVWRKNDENITLETVCHDP |
| | | KLPYHDFILEDAASPKCIMKEKKKPGETFFMCSCSSDECND |
| | | NIIFSEEYNTSNPDGGGGSGGGGSGGGGSRTVAAPSVFIFPP |
| | | SDEQLKSGTASVVCLLNNFYPREAKVQWKVDNALQSGNS |
| | | QESVTEQDSKDSTYSLSSTLTLSKADYEKHKVYACEVTHQ |
| | | GLSSPVTKSFNRGEC |

### Immune Cell Engagers

[0782] The immune cell engagers of the multispecific or multifunctional molecules disclosed herein can mediate binding to, and/or activation of, an immune cell, e.g., an immune effector cell. In some embodiments, the immune cell is chosen from a T cell, an NK cell, a B cell, a dendritic cell, or a macrophage cell engager, or a combination thereof. In some embodiments, the immune cell engager is chosen from one, two, three, or all of a T cell engager, NK cell engager, a B cell engager, a dendritic cell engager, or a macrophage cell engager, or a combination thereof. The immune cell engager can be an agonist of the immune system. In some embodiments, the immune cell engager can be an antibody molecule, a ligand molecule (e.g., a ligand that further comprises an immunoglobulin constant region, e.g., an Fc region), a small molecule, a nucleotide molecule.

### Natural Killer Cell Engagers

[0783] Natural Killer (NK) cells recognize and destroy tumors and virus-infected cells in an antibody-independent manner. The regulation of NK cells is mediated by activating and inhibiting receptors on the NK cell surface. One family of activating receptors is the natural cytotoxicity receptors (NCRs) which include NKp30, NKp44 and NKp46. For example, the NCRs can initiate tumor targeting by recognition of heparan sulfate on cancer cells. NKG2D is a receptor that provides both stimulatory and costimulatory innate immune responses on activated killer (NK) cells, leading to cytotoxic activity. DNAM1 is a receptor involved in intercellular adhesion, lymphocyte signaling, cytotoxicity and lymphokine secretion mediated by cytotoxic T-lymphocyte (CTL) and NK cell. DAP10 (also known as HCST) is a transmembrane adapter protein which associates with KLRK1 to form an activation receptor KLRK1-HCST in lymphoid and myeloid cells; this receptor plays a major role in triggering cytotoxicity against target cells expressing cell surface ligands such as MHC class I chain-related MICA and MICB, and U (optionally L1)6-binding proteins (ULBPs); it KLRK1-HCST receptor plays a role in immune surveillance against tumors and is required for cytolysis of tumors cells; indeed, melanoma cells that do not express KLRK1 ligands escape from immune surveillance mediated by NK cells. CD16 is a receptor for the Fc region of IgG, which binds complexed or aggregated IgG and also monomeric IgG and thereby mediates antibody-dependent cellular cytotoxicity (ADCC) and other antibody-dependent responses, such as phagocytosis. Without wishing to be bound by theory, it is thought that NK cell engagers that bind, recruit, and/or activate receptors like those disclosed above (e.g., NKp30, NKp36, NKG2D, or CD16) may target immune system activity to a target cell, e.g., a cell comprising a TCRBV antigen (e.g., a TCRBV antigen corresponding to a biased TCRBV clonotype), e.g., promote cell death or lysis of a target cell.

[0784] The present disclosure provides, inter alia, multispecific (e.g., bi-, tri-, quad-specific) or multifunctional molecules, that are engineered to contain one or more NK cell engagers that mediate binding to and/or activation of an NK cell. Accordingly, in some embodiments, the NK cell engager is selected from an antigen binding domain or ligand that binds to (e.g., activates): NKp30, NKp40, NKp44, NKp46, NKG2D, DNAM1, DAP10, CD16 (e.g., CD16a, CD16b, or both), CRTAM, CD27, PSGL1, CD96, CD100 (SEMA4D), NKp80, CD244 (also known as SLAMF4 or 2B4), SLAMF6, SLAMF7, KIR2DS2, KIR2DS4, KIR3DS1, KIR2DS3, KIR2DS5, KIR2DS1, CD94, NKG2C, NKG2E, or CD160.

[0785] In some embodiments, the NK cell engager is an antigen binding domain that binds to NKp30 (e.g., NKp30 present, e.g., expressed or displayed, on the surface of an NK cell) and comprises any CDR amino acid sequence, framework region (FWR) amino acid sequence, or variable region amino acid sequence disclosed in Tables 7-10. In some embodiments, the NK cell engager is an antigen binding domain that binds to NKp30 (e.g., NKp30 present, e.g., expressed or displayed, on the surface of an NK cell) and comprises any CDR amino acid sequence, framework region (FWR) amino acid sequence, or variable region amino acid sequence disclosed in U.S. Pat. Nos. 6,979,546, 9,447,185, PCT Application No. WO2015121383A1, PCT Application No. WO2016110468A1, PCT Application No.

[0786] WO2004056392A1, or U.S. Application Publication No. US20070231322A1, the sequences of which are hereby incorporated by reference. In some embodiments, binding of the NK cell engager, e.g., antigen binding domain that binds to NKp30, to the NK cell activates the NK cell. An antigen binding domain that binds to NKp30 (e.g., NKp30 present, e.g., expressed or displayed, on the surface of an NK cell) may be said to target NKp30, the NK cell, or both.

[0787] In some embodiments, the antigen binding domain that binds to NKp30 comprises one or more CDRs (e.g., VHCDR1, VHCDR2, VHCDR3, VLCDR1, VLCDR2, and/or VLCDR3) disclosed in Table 7, Table 18, or Table 8, or a sequence having at least 85%, 90%, 95%, or 99% identity thereto. In some embodiments, the antigen binding domain that binds to NKp30 comprises one or more framework regions (e.g., VHFWR1, VHFWR2, VHFWR3, VHFWR4, VLFWR1, VLFWR2, VLFWR3, and/or VLFWR4) disclosed in Table 7, Table 18, or Table 8, or a sequence having at least 85%, 90%, 95%, or 99% identity thereto. In some embodiments, the antigen binding domain that binds to NKp30 comprises a VH and/or a VL disclosed in Table 9, or a sequence having at least 85%, 90%, 95%, or 99% identity thereto. In some embodiments, any of the VH domains disclosed in Table 9 may be paired with any of the VL domains disclosed in Table 9 to form the antigen binding domain that binds to NKp30. In some embodiments, the antigen binding domain that binds to NKp30 comprises an amino acid sequence disclosed in Table 10, or a sequence having at least 85%, 90%, 95%, or 99% identity thereto.

[0788] In some embodiments, the antigen binding domain that binds to NKp30 comprises a VH comprising a heavy chain complementarity determining region 1 (VHCDR1), a VHCDR2, and a VHCDR3, and a VL comprising a light chain complementarity determining region 1 (VLCDR1), a VLCDR2, and a VLCDR3.

[0789] In some embodiments, the VHCDR1, VHCDR2, and VHCDR3 comprise the amino acid sequences of SEQ ID NOs: 7313, 6001, and 7315, respectively (or a sequence having at least 85%, 90%, 95%, or 99% identity thereto). In some embodiments, the VHCDR1, VHCDR2, and VHCDR3 comprise the amino acid sequences of SEQ ID NOs: 7313, 6001, and 6002, respectively (or a sequence having at least 85%, 90%, 95%, or 99% identity thereto). In some embodiments, the VHCDR1, VHCDR2, and VHCDR3 comprise the amino acid sequences of SEQ ID NOs: 7313, 6008, and 6009, respectively (or a sequence having at least 85%, 90%, 95%, or 99% identity thereto). In some embodiments, the VHCDR1, VHCDR2, and VHCDR3 comprise the amino acid sequences of SEQ ID NOs: 7313, 7385, and 7315, respectively (or a sequence having at least 85%, 90%, 95%, or 99% identity thereto). In some embodiments, the VHCDR1, VHCDR2, and VHCDR3 comprise the amino acid sequences of SEQ ID NOs: 7313, 7318, and 6009, respectively (or a sequence having at least 85%, 90%, 95%, or 99% identity thereto).

[0790] In some embodiments, the VLCDR1, VLCDR2, and VLCDR3 comprise the amino acid sequences of SEQ ID NOs: 7326, 7327, and 7329, respectively (or a sequence having at least 85%, 90%, 95%, or 99% identity thereto). In some embodiments, the VLCDR1, VLCDR2, and VLCDR3 comprise the amino acid sequences of SEQ ID NOs: 6063, 6064, and 7293, respectively (or a sequence having at least 85%, 90%, 95%, or 99% identity thereto). In some embodiments, the VLCDR1, VLCDR2, and VLCDR3 comprise the amino acid sequences of SEQ ID NOs: 6070, 6071, and 6072, respectively (or a sequence having at least 85%, 90%, 95%, or 99% identity thereto). In some embodiments, the VLCDR1, VLCDR2, and VLCDR3 comprise the amino acid sequences of SEQ ID NOs: 6070, 6064, and 7321, respectively (or a sequence having at least 85%, 90%, 95%, or 99% identity thereto).

[0791] In some embodiments, the VHCDR1, VHCDR2, VHCDR3, VLCDR1, VLCDR2, and VLCDR3 comprise the amino acid sequences of SEQ ID NOs: 7313, 6001, 7315, 7326, 7327, and 7329, respectively (or a sequence having at least 85%, 90%, 95%, or 99% identity thereto). In some embodiments, the VHCDR1, VHCDR2, VHCDR3, VLCDR1, VLCDR2, and VLCDR3 comprise the amino acid sequences of SEQ ID NOs: 7313, 6001, 6002, 6063, 6064, and 7293, respectively (or a sequence having at least 85%, 90%, 95%, or 99% identity thereto). In some embodiments, the VHCDR1, VHCDR2, VHCDR3, VLCDR1, VLCDR2, and VLCDR3 comprise the amino acid sequences of SEQ ID NOs: 7313, 6008, 6009, 6070, 6071, and 6072, respectively (or a sequence having at least 85%, 90%, 95%, or 99% identity thereto). In some embodiments, the VHCDR1, VHCDR2, VHCDR3, VLCDR1, VLCDR2, and VLCDR3 comprise the amino acid sequences of SEQ ID NOs: 7313, 7385, 7315, 6070, 6064, and 7321, respectively (or a sequence having at least 85%, 90%, 95%, or 99% identity thereto). In some embodiments, the VHCDR1, VHCDR2, VHCDR3, VLCDR1, VLCDR2, and VLCDR3 comprise the amino acid sequences of SEQ ID NOs: 7313, 7318, 6009, 6070, 6064, and 7321, respectively (or a sequence having at least 85%, 90%, 95%, or 99% identity thereto).

[0792] In some embodiments, the VH comprises an amino acid sequence selected from the group consisting of SEQ ID NOs: 7298 or 7300-7304 (or a sequence having at least 85%, 90%, 95%, or 99% identity thereto) and/or the VL comprises an amino acid sequence selected from the group consisting of SEQ ID NOs: 7299 or 7305-7309 (or a sequence having at least 85%, 90%, 95%, or 99% identity thereto). In some embodiments, the VH and VL comprise the amino acid sequences of SEQ ID NOs: 7302 and 7305, respectively (or a sequence having at least 85%, 90%, 95%, or 99% identity thereto). In some embodiments, the VH and VL comprise the amino acid sequences of SEQ ID NOs: 7302 and 7309, respectively (or a sequence having at least 85%, 90%, 95%, or 99% identity thereto).

[0793] In some embodiments, the VH comprises an amino acid sequence selected from the group consisting of SEQ ID NOs: 6121 or 6123-6128 (or a sequence having at least 85%, 90%, 95%, or 99% identity thereto) and/or the VL comprises an amino acid sequence selected from the group consisting of SEQ ID NOs: 7294 or 6137-6141 (or a sequence having at least 85%, 90%, 95%, or 99% identity thereto). In some embodiments, the VH comprises an amino acid sequence selected from the group consisting of SEQ ID NOs: 6122 or 6129-6134 (or a sequence having at least 85%, 90%, 95%, or 99% identity thereto) and/or the VL comprises an amino acid sequence selected from the group consisting of SEQ ID NOs: 6136 or 6142-6147 (or a sequence having at least 85%, 90%, 95%, or 99% identity thereto). In some embodiments, the VH and VL comprise the amino acid sequences of SEQ ID NOs: 7295 and 7296, respectively (or a sequence having at least 85%, 90%, 95%, or 99% identity thereto). In some embodiments, the VH and VL comprise the amino acid sequences of SEQ ID NOs: 7297 and 7296, respectively (or a sequence having at least 85%, 90%, 95%, or 99% identity thereto). In some embodiments, the VH and VL comprise the amino acid sequences of SEQ ID NOs: 6122 and 6136, respectively (or a sequence having at least 85%, 90%, 95%, or 99% identity thereto).

[0794] In some embodiments, the antigen binding domain that binds to NKp30 comprises the amino acid sequence of SEQ ID NO: 7310 (or a sequence having at least 85%, 90%, 95%, or 99% identity thereto). In some embodiments, the antigen binding domain that binds to NKp30 comprises the amino acid sequence of SEQ ID NO: 7311 (or a sequence having at least 85%, 90%, 95%, or 99% identity thereto). In some embodiments, the antigen binding domain that binds to NKp30 comprises the amino acid sequence of SEQ ID NO: 6187, 6188, 6189 or 6190 (or a sequence having at least 85%, 90%, 95%, or 99% identity thereto). In some embodiments, the antigen binding domain that targets NKp30 comprises a VH comprising a heavy chain complementarity determining region 1 (VHCDR1) amino acid sequence of SEQ ID NO: 6000 (or a sequence with no more than 1, 2, 3, or 4 mutations, e.g., substitutions, additions, or deletions), a VHCDR2 amino acid sequence of SEQ ID NO: 6001 (or a sequence with no more than 1, 2, 3, or 4 mutations, e.g., substitutions, additions, or deletions), and/or a VHCDR3 amino acid sequence of SEQ ID NO: 6002 (or a sequence with no more than 1, 2, 3, or 4 mutations, e.g., substitutions, additions, or deletions). In some embodiments, the NKp30 antigen binding domain comprises a VH comprising a VHCDR1 amino acid sequence of SEQ ID NO: 6000, a VHCDR2 amino acid sequence of SEQ ID NO: 6001, and/or a VHCDR3 amino acid sequence of SEQ ID NO: 6002.

[0795] In some embodiments, the antigen binding domain that targets NKp30 comprises a VL comprising a light chain complementarity determining region 1 (VLCDR1) amino acid sequence of SEQ ID NO: 6063 (or a sequence with no more than 1, 2, 3, or 4 mutations, e.g., substitutions, additions, or deletions), a VLCDR2 amino acid sequence of SEQ ID NO: 6064 (or a sequence with no more than 1, 2, 3, or 4 mutations, e.g., substitutions, additions, or deletions), and/or a VLCDR3 amino acid sequence of SEQ ID NO: 7293 (or a sequence with no more than 1, 2, 3, or 4 mutations, e.g., substitutions, additions, or deletions). In some embodiments, the antigen binding domain that targets NKp30 comprises a VL comprising a VLCDR1 amino acid sequence of SEQ ID NO: 6063, a VLCDR2 amino acid sequence of SEQ ID NO: 6064, and a VLCDR3 amino acid sequence of SEQ ID NO: 7293.

[0796] In some embodiments, the antigen binding domain that targets NKp30 comprises a VH comprising a heavy chain complementarity determining region 1 (VHCDR1) amino acid sequence of SEQ ID NO: 6000 (or a sequence with no more than 1, 2, 3, or 4 mutations, e.g., substitutions, additions, or deletions), a VHCDR2 amino acid sequence of SEQ ID NO: 6001 (or a sequence with no more than 1, 2, 3, or 4 mutations, e.g., substitutions, additions, or deletions), and/or a VHCDR3 amino acid sequence of SEQ ID NO: 6002 (or a sequence with no more than 1, 2, 3, or 4 mutations, e.g., substitutions, additions, or deletions), and a VL comprising a light chain complementarity determining region 1 (VLCDR1) amino acid sequence of SEQ ID NO: 6063 (or a sequence with no more than 1, 2, 3, or 4 mutations, e.g., substitutions, additions, or deletions), a VLCDR2 amino acid sequence of SEQ ID NO: 6064 (or a sequence with no more than 1, 2, 3, or 4 mutations, e.g., substitutions, additions, or deletions), and/or a VLCDR3 amino acid sequence of SEQ ID NO: 7293 (or a sequence with no more than 1, 2, 3, or 4 mutations, e.g., substitutions, additions, or deletions). In some embodiments, the NKp30 antigen binding domain comprises a VH comprising a VHCDR1 amino acid sequence of SEQ ID NO: 6000, a VHCDR2 amino acid sequence of SEQ ID NO: 6001, and/or a VHCDR3 amino acid sequence of SEQ ID NO: 6002, and a VL comprising a VLCDR1 amino acid sequence of SEQ ID NO: 6063, a VLCDR2 amino acid sequence of SEQ ID NO: 6064, and a VLCDR3 amino acid sequence of SEQ ID NO: 7293.

[0797] In some embodiments, the antigen binding domain that targets NKp30 comprises a VH comprising a heavy chain complementarity determining region 1 (VHCDR1) amino acid sequence of SEQ ID NO: 6007 (or a sequence with no more than 1, 2, 3, or 4 mutations, e.g., substitutions, additions, or deletions), a VHCDR2 amino acid sequence of SEQ ID NO: 6008 (or a sequence with no more than 1, 2, 3, or 4 mutations, e.g., substitutions, additions, or deletions), and/or a VHCDR3 amino acid sequence of SEQ ID NO: 6009 (or a sequence with no more than 1, 2, 3, or 4 mutations, e.g., substitutions, additions, or deletions). In some embodiments, the NKp30 antigen binding domain comprises a VH comprising a VHCDR1 amino acid sequence of SEQ ID NO: 6007, a VHCDR2 amino acid sequence of SEQ ID NO: 6008, and/or a VHCDR3 amino acid sequence of SEQ ID NO: 6009.

[0798] In some embodiments, the antigen binding domain that targets NKp30 comprises a VL comprising a light chain complementarity determining region 1 (VLCDR1) amino acid sequence of SEQ ID NO: 6070 (or a sequence with no more than 1, 2, 3, or 4 mutations, e.g., substitutions, additions, or deletions), a VLCDR2 amino acid sequence of SEQ ID NO: 6071 (or a sequence with no more than 1, 2, 3, or 4 mutations, e.g., substitutions, additions, or deletions), and/or a VLCDR3 amino acid sequence of SEQ ID NO: 6072 (or a sequence with no more than 1, 2, 3, or 4 mutations, e.g., substitutions, additions, or deletions). In some embodiments, the antigen binding domain that targets NKp30 comprises a VL comprising a VLCDR1 amino acid sequence of SEQ ID NO: 6070, a VLCDR2 amino acid sequence of SEQ ID NO: 6071, and a VLCDR3 amino acid sequence of SEQ ID NO: 6072.

[0799] In some embodiments, the antigen binding domain that targets NKp30 comprises a VH comprising a heavy chain complementarity determining region 1 (VHCDR1) amino acid sequence of SEQ ID NO: 6007 (or a sequence with no more than 1, 2, 3, or 4 mutations, e.g., substitutions, additions, or deletions), a VHCDR2 amino acid sequence of SEQ ID NO: 6008 (or a sequence with no more than 1, 2, 3, or 4 mutations, e.g., substitutions, additions, or deletions), and/or a VHCDR3 amino acid sequence of SEQ ID NO: 6009 (or a sequence with no more than 1, 2, 3, or 4 mutations, e.g., substitutions, additions, or deletions), and a VL comprising a light chain complementarity determining region 1 (VLCDR1) amino acid sequence of SEQ ID NO: 6070 (or a sequence with no more than 1, 2, 3, or 4 mutations, e.g., substitutions, additions, or deletions), a VLCDR2 amino acid sequence of SEQ ID NO: 6071 (or a sequence with no more than 1, 2, 3, or 4 mutations, e.g., substitutions, additions, or deletions), and/or a VLCDR3 amino acid sequence of SEQ ID NO: 6072 (or a sequence with no more than 1, 2, 3, or 4 mutations, e.g., substitutions, additions, or deletions). In some embodiments, the NKp30 antigen binding domain comprises a VH comprising a VHCDR1 amino acid sequence of SEQ ID NO: 6007, a VHCDR2 amino acid sequence of SEQ ID NO: 6008, and/or a VHCDR3 amino acid sequence of SEQ ID NO: 6009, and a VL comprising a VLCDR1 amino acid sequence of SEQ ID NO: 6070, a VLCDR2 amino acid sequence of SEQ ID NO: 6071, and a VLCDR3 amino acid sequence of SEQ ID NO: 6072.

[0800] In some embodiments, the antigen binding domain that targets NKp30 comprises a VH comprising a heavy chain framework region 1 (VHFWR1) amino acid sequence of SEQ ID NO: 6003, a VHFWR2 amino acid sequence of SEQ ID NO: 6004, a VHFWR3 amino acid sequence of SEQ ID NO: 6005, and/or a VHFWR4 amino acid sequence of SEQ ID NO: 6006.

[0801] In some embodiments, the antigen binding domain that targets NKp30 comprises a VL comprising a light chain framework region 1 (VLFWR1) amino acid sequence of SEQ ID NO: 6066, a VLFWR2 amino acid sequence of SEQ ID NO: 6067, a VLFWR3 amino acid sequence of SEQ ID NO: 7292, and/or a VLFWR4 amino acid sequence of SEQ ID NO: 6069.

[0802] In some embodiments, the antigen binding domain that targets NKp30 comprises a VH comprising a heavy chain framework region 1 (VHFWR1) amino acid sequence of SEQ ID NO: 6003, a VHFWR2 amino acid sequence of SEQ ID NO: 6004, a VHFWR3 amino acid sequence of SEQ ID NO: 6005, and/or a VHFWR4 amino acid sequence of SEQ ID NO: 6006, and a VL comprising a light chain framework region 1 (VLFWR1) amino acid sequence of SEQ ID NO: 6066, a VLFWR2 amino acid sequence of SEQ ID NO: 6067, a VLFWR3 amino acid sequence of SEQ ID NO: 7292, and/or a VLFWR4 amino acid sequence of SEQ ID NO: 6069.

[0803] In some embodiments, the antigen binding domain that targets NKp30 comprises a VH comprising a VHFWR1 amino acid sequence of SEQ ID NO: 6003 (or a sequence with no more than 1, 2, 3, 4, 5, or 6 mutations, e.g., substitutions, additions, or deletions, therefrom), a VHFWR2 amino acid sequence of SEQ ID NO: 6004 (or a sequence with no more than 1, 2, 3, 4, 5, or 6 mutations, e.g., substitutions, additions, or deletions, therefrom), a VHFWR3 amino acid sequence of SEQ ID NO: 6005 (or a sequence with no more than 1, 2, 3, 4, 5, 6, 7, 8, 9, 10, or 11 mutations, e.g., substitutions, additions, or deletions), and/or a VHFWR4 amino acid sequence of SEQ ID NO: 6006.

[0804] In some embodiments, the antigen binding domain that targets NKp30 comprises a VL comprising a VLFWR1 amino acid sequence of SEQ ID NO: 6066 (or a sequence with no more than 1, 2, or 3 mutations, e.g., substitutions, additions, or deletions), a VLFWR2 amino acid sequence of SEQ ID NO: 6067 (or a sequence with no more than 1 mutation, e.g., substitution, addition, or deletion), a VLFWR3 amino acid sequence of SEQ ID NO: 7292 (or a sequence with no more than 1 mutation, e.g., substitution, addition, or deletion), and/or a VLFWR4 amino acid sequence of SEQ ID NO: 6069.

[0805] In some embodiments, the antigen binding domain that targets NKp30 comprises a VH comprising a VHFWR1 amino acid sequence of SEQ ID NO: 6003 (or a sequence with no more than 1, 2, 3, 4, 5, or 6 mutations, e.g., substitutions, additions, or deletions, therefrom), a VHFWR2 amino acid sequence of SEQ ID NO: 6004 (or a sequence with no more than 1, 2, 3, 4, 5, or 6 mutations, e.g., substitutions, additions, or deletions, therefrom), a VHFWR3 amino acid sequence of SEQ ID NO: 6005 (or a sequence with no more than 1, 2, 3, 4, 5, 6, 7, 8, 9, 10, or 11 mutations, e.g., substitutions, additions, or deletions), and/or a VHFWR4 amino acid sequence of SEQ ID NO: 6006, and a VL comprising a VLFWR1 amino acid sequence of SEQ ID NO: 6066 (or a sequence with no more than 1, 2, or 3 mutations, e.g., substitutions, additions, or deletions), a VLFWR2 amino acid sequence of SEQ ID NO: 6067 (or a sequence with no more than 1 mutation, e.g., substitution, addition, or deletion), a VLFWR3 amino acid sequence of SEQ ID NO: 7292 (or a sequence with no more than 1 mutation, e.g., substitution, addition, or deletion), and/or a VLFWR4 amino acid sequence of SEQ ID NO: 6069.

[0806] In some embodiments, the antigen binding domain that targets NKp30 comprises a VH comprising a heavy chain framework region 1 (VHFWR1) amino acid sequence of SEQ ID NO: 6010, a VHFWR2 amino acid sequence of SEQ ID NO: 6011, a VHFWR3 amino acid sequence of SEQ ID NO: 6012, and/or a VHFWR4 amino acid sequence of SEQ ID NO: 6013.

[0807] In some embodiments, the antigen binding domain that targets NKp30 comprises a VL comprising a light chain framework region 1 (VLFWR1) amino acid sequence of SEQ ID NO: 6073, a VLFWR2 amino acid sequence of SEQ ID NO: 6074, a VLFWR3 amino acid sequence of SEQ ID NO: 6075, and/or a VLFWR4 amino acid sequence of SEQ ID NO: 6076.

[0808] In some embodiments, the antigen binding domain that targets NKp30 comprises a VH comprising a heavy chain framework region 1 (VHFWR1) amino acid sequence of SEQ ID NO: 6010, a VHFWR2 amino acid sequence of SEQ ID NO: 6011, a VHFWR3 amino acid sequence of SEQ ID NO: 6012, and/or a VHFWR4 amino acid sequence of SEQ ID NO: 6013, and a VL comprising a light chain framework region 1 (VLFWR1) amino acid sequence of SEQ ID NO: 6073, a VLFWR2 amino acid sequence of SEQ ID NO: 6074, a VLFWR3 amino acid sequence of SEQ ID NO: 6075, and/or a VLFWR4 amino acid sequence of SEQ ID NO: 6076.

[0809] In some embodiments, the antigen binding domain that targets NKp30 comprises a VH comprising a VHFWR1 amino acid sequence of SEQ ID NO: 6010 (or a sequence with no more than 1, 2, 3, 4, 5, or 6 mutations, e.g., substitutions, additions, or deletions, therefrom), a VHFWR2 amino acid sequence of SEQ ID NO: 6011 (or a sequence with no more than 1, 2, 3, 4, 5, or 6 mutations, e.g., substitutions, additions, or deletions, therefrom), a VHFWR3 amino acid sequence of SEQ ID NO: 6012 (or a sequence with no more than 1, 2, 3, 4, 5, 6, 7, 8, 9, 10, or 11 mutations, e.g., substitutions, additions, or deletions), and/or a VHFWR4 amino acid sequence of SEQ ID NO: 6013.

[0810] In some embodiments, the antigen binding domain that targets NKp30 comprises a VL comprising a VLFWR1 amino acid sequence of SEQ ID NO: 6073 (or a sequence with no more than 1, 2, or 3 mutations, e.g., substitutions, additions, or deletions), a VLFWR2 amino acid sequence of SEQ ID NO: 6074 (or a sequence with no more than 1 mutation, e.g., substitution, addition, or deletion), a VLFWR3 amino acid sequence of SEQ ID NO: 6075 (or a sequence with no more than 1 mutation, e.g., substitution, addition, or deletion), and/or a VLFWR4 amino acid sequence of SEQ ID NO: 6076.

[0811] In some embodiments, the antigen binding domain that targets NKp30 comprises a VH comprising a VHFWR1 amino acid sequence of SEQ ID NO: 6010 (or a sequence with no more than 1, 2, 3, 4, 5, or 6 mutations, e.g., substitutions, additions, or deletions, therefrom), a VHFWR2 amino acid sequence of SEQ ID NO: 6011 (or a sequence with no more than 1, 2, 3, 4, 5, or 6 mutations, e.g., substitutions, additions, or deletions, therefrom), a VHFWR3 amino acid sequence of SEQ ID NO: 6012 (or a sequence with no more than 1, 2, 3, 4, 5, 6, 7, 8, 9, 10, or 11 mutations, e.g., substitutions, additions, or deletions), and/or a VHFWR4 amino acid sequence of SEQ ID NO: 6013, and a VL comprising a VLFWR1 amino acid sequence of SEQ ID NO: 6073 (or a sequence with no more than 1, 2, or 3 mutations, e.g., substitutions, additions, or deletions), a VLFWR2 amino acid sequence of SEQ ID NO: 6074 (or a sequence with no more than 1 mutation, e.g., substitution, addition, or deletion), a VLFWR3 amino acid sequence of SEQ ID NO: 6075 (or a sequence with no more than 1 mutation, e.g., substitution, addition, or deletion), and/or a VLFWR4 amino acid sequence of SEQ ID NO: 6076.

[0812] In some embodiments, the antigen binding domain that targets NKp30 comprises a VH comprising a heavy chain framework region 1 (VHFWR1) amino acid sequence of SEQ ID NO: 6014, a VHFWR2 amino acid sequence of SEQ ID NO: 6015, a VHFWR3 amino acid sequence of SEQ ID NO: 6016, and/or a VHFWR4 amino acid sequence of SEQ ID NO: 6017.

[0813] In some embodiments, the antigen binding domain that targets NKp30 comprises a VH comprising a VHFWR1 amino acid sequence of SEQ ID NO: 6014 (or a sequence with no more than 1, 2, 3, 4, 5, or 6 mutations, e.g., substitutions, additions, or deletions, therefrom), a VHFWR2 amino acid sequence of SEQ ID NO: 6015 (or a sequence with no more than 1, 2, 3, 4, 5, or 6 mutations, e.g., substitutions, additions, or deletions, therefrom), a VHFWR3 amino acid sequence of SEQ ID NO: 6016 (or a sequence with no more than 1, 2, 3, 4, 5, 6, 7, 8, 9, 10, or 11 mutations, e.g., substitutions, additions, or deletions), and/or a VHFWR4 amino acid sequence of SEQ ID NO: 6017.

[0814] In some embodiments, the antigen binding domain that targets NKp30 comprises a VL comprising a light chain framework region 1 (VLFWR1) amino acid sequence of SEQ ID NO: 6077, a VLFWR2 amino acid sequence of SEQ ID NO: 6078, a VLFWR3 amino acid sequence of SEQ ID NO: 6079, and/or a VLFWR4 amino acid sequence of SEQ ID NO: 6080.

[0815] In some embodiments, the antigen binding domain that targets NKp30 comprises a VL comprising a VLFWR1 amino acid sequence of SEQ ID NO: 6077 (or a sequence with no more than 1, 2, or 3 mutations, e.g., substitutions, additions, or deletions), a VLFWR2 amino acid sequence of SEQ ID NO: 6078 (or a sequence with no more than 1 mutation, e.g., substitution, addition, or deletion), a VLFWR3 amino acid sequence of SEQ ID NO: 6079 (or a sequence with no more than 1 mutation, e.g., substitution, addition, or deletion), and/or a VLFWR4 amino acid sequence of SEQ ID NO: 6080.

[0816] In some embodiments, the antigen binding domain that targets NKp30 comprises a VH comprising a heavy chain framework region 1 (VHFWR1) amino acid sequence of SEQ ID NO: 6018, a VHFWR2 amino acid sequence of SEQ ID NO: 6019, a VHFWR3 amino acid sequence of SEQ ID NO: 6020, and/or a VHFWR4 amino acid sequence of SEQ ID NO: 6021.

[0817] In some embodiments, the antigen binding domain that targets NKp30 comprises a VH comprising a VHFWR1 amino acid sequence of SEQ ID NO: 6018 (or a sequence with no more than 1, 2, 3, 4, 5, or 6 mutations, e.g., substitutions, additions, or deletions, therefrom), a VHFWR2 amino acid sequence of SEQ ID NO: 6019 (or a sequence with no more than 1, 2, 3, 4, 5, or 6 mutations, e.g., substitutions, additions, or deletions, therefrom), a VHFWR3 amino acid sequence of SEQ ID NO: 6020 (or a sequence with no more than 1, 2, 3, 4, 5, 6, 7, 8, 9, 10, or 11 mutations, e.g., substitutions, additions, or deletions), and/or a VHFWR4 amino acid sequence of SEQ ID NO: 6021.

[0818] In some embodiments, the antigen binding domain that targets NKp30 comprises a VL comprising a light chain framework region 1 (VLFWR1) amino acid sequence of SEQ ID NO: 6081, a VLFWR2 amino acid sequence of SEQ ID NO: 6082, a VLFWR3 amino acid sequence of SEQ ID NO: 6083, and/or a VLFWR4 amino acid sequence of SEQ ID NO: 6084.

[0819] In some embodiments, the antigen binding domain that targets NKp30 comprises a VL comprising a VLFWR1 amino acid sequence of SEQ ID NO: 6081 (or a sequence with no more than 1, 2, or 3 mutations, e.g., substitutions, additions, or deletions), a VLFWR2 amino acid sequence of SEQ ID NO: 6082 (or a sequence with no more than 1 mutation, e.g., substitution, addition, or deletion), a VLFWR3 amino acid sequence of SEQ ID NO: 6083 (or a sequence with no more than 1 mutation, e.g., substitution, addition, or deletion), and/or a VLFWR4 amino acid sequence of SEQ ID NO: 6084.

[0820] In some embodiments, the antigen binding domain that targets NKp30 comprises a VH comprising a heavy chain framework region 1 (VHFWR1) amino acid sequence of SEQ ID NO: 6022, a VHFWR2 amino acid sequence of SEQ ID NO: 6023, a VHFWR3 amino acid sequence of SEQ ID NO: 6024, and/or a VHFWR4 amino acid sequence of SEQ ID NO: 6025.

[0821] In some embodiments, the antigen binding domain that targets NKp30 comprises a VH comprising a VHFWR1 amino acid sequence of SEQ ID NO: 6022 (or a sequence with no more than 1, 2, 3, 4, 5, or 6 mutations, e.g., substitutions, additions, or deletions, therefrom), a VHFWR2 amino acid sequence of SEQ ID NO: 6023 (or a sequence with no more than 1, 2, 3, 4, 5, or 6 mutations, e.g., substitutions, additions, or deletions, therefrom), a VHFWR3 amino acid sequence of SEQ ID NO: 6024 (or a sequence with no more than 1, 2, 3, 4, 5, 6, 7, 8, 9, 10, or 11 mutations, e.g., substitutions, additions, or deletions), and/or a VHFWR4 amino acid sequence of SEQ ID NO: 6025.

[0822] In some embodiments, the antigen binding domain that targets NKp30 comprises a VL comprising a light chain framework region 1 (VLFWR1) amino acid sequence of SEQ ID NO: 6085, a VLFWR2 amino acid sequence of SEQ ID NO: 6086, a VLFWR3 amino acid sequence of SEQ ID NO: 6087, and/or a VLFWR4 amino acid sequence of SEQ ID NO: 6088.

[0823] In some embodiments, the antigen binding domain that targets NKp30 comprises a VL comprising a VLFWR1 amino acid sequence of SEQ ID NO: 6085 (or a sequence with no more than 1, 2, or 3 mutations, e.g., substitutions, additions, or deletions), a VLFWR2 amino acid sequence of SEQ ID NO: 6086 (or a sequence with no more than 1 mutation, e.g., substitution, addition, or deletion), a VLFWR3 amino acid sequence of SEQ ID NO: 6087 (or a sequence with no more than 1 mutation, e.g., substitution, addition, or deletion), and/or a VLFWR4 amino acid sequence of SEQ ID NO: 6088.

[0824] In some embodiments, the antigen binding domain that targets NKp30 comprises a VH comprising a heavy chain framework region 1 (VHFWR1) amino acid sequence of SEQ ID NO: 6026, a VHFWR2 amino acid sequence of SEQ ID NO: 6027, a VHFWR3 amino acid sequence of SEQ ID NO: 6028, and/or a VHFWR4 amino acid sequence of SEQ ID NO: 6029.

[0825] In some embodiments, the antigen binding domain that targets NKp30 comprises a VH comprising a VHFWR1 amino acid sequence of SEQ ID NO: 6026 (or a sequence with no more than 1, 2, 3, 4, 5, or 6 mutations, e.g., substitutions, additions, or deletions, therefrom), a VHFWR2 amino acid sequence of SEQ ID NO: 6027 (or a sequence with no more than 1, 2, 3, 4, 5, or 6 mutations, e.g., substitutions, additions, or deletions, therefrom), a VHFWR3 amino acid sequence of SEQ ID NO: 6028 (or a sequence with no more than 1, 2, 3, 4, 5, 6, 7, 8, 9, 10, or 11 mutations, e.g., substitutions, additions, or deletions), and/or a VHFWR4 amino acid sequence of SEQ ID NO: 6029.

[0826] In some embodiments, the antigen binding domain that targets NKp30 comprises a VL comprising a light chain framework region 1 (VLFWR1) amino acid sequence of SEQ ID NO: 6089, a VLFWR2 amino acid sequence of SEQ ID NO: 6090, a VLFWR3 amino acid sequence of SEQ ID NO: 6091, and/or a VLFWR4 amino acid sequence of SEQ ID NO: 6092.

[0827] In some embodiments, the antigen binding domain that targets NKp30 comprises a VL comprising a VLFWR1 amino acid sequence of SEQ ID NO: 6089 (or a sequence with no more than 1, 2, or 3 mutations, e.g., substitutions, additions, or deletions), a VLFWR2 amino acid sequence of SEQ ID NO: 6090 (or a sequence with no more than 1 mutation, e.g., substitution, addition, or deletion), a VLFWR3 amino acid sequence of SEQ ID NO: 6091 (or a sequence with no more than 1 mutation, e.g., substitution, addition, or deletion), and/or a VLFWR4 amino acid sequence of SEQ ID NO: 6092.

[0828] In some embodiments, the antigen binding domain that targets NKp30 comprises a VH comprising a heavy chain framework region 1 (VHFWR1) amino acid sequence of SEQ ID NO: 6030, a VHFWR2 amino acid sequence of SEQ ID NO: 6032, a VHFWR3 amino acid sequence of SEQ ID NO: 6033, and/or a VHFWR4 amino acid sequence of SEQ ID NO: 6034.

[0829] In some embodiments, the antigen binding domain that targets NKp30 comprises a VH comprising a VHFWR1 amino acid sequence of SEQ ID NO: 6030 (or a sequence with no more than 1, 2, 3, 4, 5, or 6 mutations, e.g., substitutions, additions, or deletions, therefrom), a VHFWR2 amino acid sequence of SEQ ID NO: 6032 (or a sequence with no more than 1, 2, 3, 4, 5, or 6 mutations, e.g., substitutions, additions, or deletions, therefrom), a VHFWR3 amino acid sequence of SEQ ID NO: 6033 (or a sequence with no more than 1, 2, 3, 4, 5, 6, 7, 8, 9, 10, or 11 mutations, e.g., substitutions, additions, or deletions), and/or a VHFWR4 amino acid sequence of SEQ ID NO: 6034.

[0830] In some embodiments, the antigen binding domain that targets NKp30 comprises a VL comprising a light chain framework region 1 (VLFWR1) amino acid sequence of SEQ ID NO: 6093, a VLFWR2 amino acid sequence of SEQ ID NO: 6094, a VLFWR3 amino acid sequence of SEQ ID NO: 6095, and/or a VLFWR4 amino acid sequence of SEQ ID NO: 6096.

[0831] In some embodiments, the antigen binding domain that targets NKp30 comprises a VL comprising a VLFWR1 amino acid sequence of SEQ ID NO: 6093 (or a sequence with no more than 1, 2, or 3 mutations, e.g., substitutions, additions, or deletions), a VLFWR2 amino acid sequence of SEQ ID NO: 6094 (or a sequence with no more than 1 mutation, e.g., substitution, addition, or deletion), a VLFWR3 amino acid sequence of SEQ ID NO: 6095 (or a sequence with no more than 1 mutation, e.g., substitution, addition, or deletion), and/or a VLFWR4 amino acid sequence of SEQ ID NO: 6096.

[0832] In some embodiments, the antigen binding domain that targets NKp30 comprises a VH comprising a heavy chain framework region 1 (VHFWR1) amino acid sequence of SEQ ID NO: 6035, a VHFWR2 amino acid sequence of SEQ ID NO: 6036, a VHFWR3 amino acid sequence of SEQ ID NO: 6037, and/or a VHFWR4 amino acid sequence of SEQ ID NO: 6038.

[0833] In some embodiments, the antigen binding domain that targets NKp30 comprises a VH comprising a VHFWR1 amino acid sequence of SEQ ID NO: 6035 (or a sequence with no more than 1, 2, 3, 4, 5, or 6 mutations, e.g., substitutions, additions, or deletions, therefrom), a VHFWR2 amino acid sequence of SEQ ID NO: 6036 (or a sequence with no more than 1, 2, 3, 4, 5, or 6 mutations, e.g., substitutions, additions, or deletions, therefrom), a VHFWR3 amino acid sequence of SEQ ID NO: 6037 (or a sequence with no more than 1, 2, 3, 4, 5, 6, 7, 8, 9, 10, or 11 mutations, e.g., substitutions, additions, or deletions), and/or a VHFWR4 amino acid sequence of SEQ ID NO: 6038.

[0834] In some embodiments, the antigen binding domain that targets NKp30 comprises a VH comprising a heavy chain framework region 1 (VHFWR1) amino acid sequence of SEQ ID NO: 6039, a VHFWR2 amino acid sequence of SEQ ID NO: 6040, a VHFWR3 amino acid sequence of SEQ ID NO: 6041, and/or a VHFWR4 amino acid sequence of SEQ ID NO: 6042.

[0835] In some embodiments, the antigen binding domain that targets NKp30 comprises a VH comprising a VHFWR1 amino acid sequence of SEQ ID NO: 6039 (or a sequence with no more than 1, 2, 3, 4, 5, or 6 mutations, e.g., substitutions, additions, or deletions, therefrom), a VHFWR2 amino acid sequence of SEQ ID NO: 6040 (or a sequence with no more than 1, 2, 3, 4, 5, or 6 mutations, e.g., substitutions, additions, or deletions, therefrom), a VHFWR3 amino acid sequence of SEQ ID NO: 6041 (or a sequence with no more than 1, 2, 3, 4, 5, 6, 7, 8, 9, 10, or 11 mutations, e.g., substitutions, additions, or deletions), and/or a VHFWR4 amino acid sequence of SEQ ID NO: 6042.

[0836] In some embodiments, the antigen binding domain that targets NKp30 comprises a VL comprising a light chain framework region 1 (VLFWR1) amino acid sequence of SEQ ID NO: 6097, a VLFWR2 amino acid sequence of SEQ ID NO: 6098, a VLFWR3 amino acid sequence of SEQ ID NO: 6099, and/or a VLFWR4 amino acid sequence of SEQ ID NO: 6100.

[0837] In some embodiments, the antigen binding domain that targets NKp30 comprises a VL comprising a VLFWR1 amino acid sequence of SEQ ID NO: 6097 (or a sequence with no more than 1, 2, or 3 mutations, e.g., substitutions, additions, or deletions), a VLFWR2 amino acid sequence of SEQ ID NO: 6098 (or a sequence with no more than 1 mutation, e.g., substitution, addition, or deletion), a VLFWR3 amino acid sequence of SEQ ID NO: 6099 (or a sequence with no more than 1 mutation, e.g., substitution, addition, or deletion), and/or a VLFWR4 amino acid sequence of SEQ ID NO: 6100.

[0838] In some embodiments, the antigen binding domain that targets NKp30 comprises a VH comprising a heavy chain framework region 1 (VHFWR1) amino acid sequence of SEQ ID NO: 6043, a VHFWR2 amino acid sequence of SEQ ID NO: 6044, a VHFWR3 amino acid sequence of SEQ ID NO: 6045, and/or a VHFWR4 amino acid sequence of SEQ ID NO: 6046.

[0839] In some embodiments, the antigen binding domain that targets NKp30 comprises a VH comprising a VHFWR1 amino acid sequence of SEQ ID NO: 6043 (or a sequence with no more than 1, 2, 3, 4, 5, or 6 mutations, e.g., substitutions, additions, or deletions, therefrom), a VHFWR2 amino acid sequence of SEQ ID NO: 6044 (or a sequence with no more than 1, 2, 3, 4, 5, or 6 mutations, e.g., substitutions, additions, or deletions, therefrom), a VHFWR3 amino acid sequence of SEQ ID NO: 6045 (or a sequence with no more than 1, 2, 3, 4, 5, 6, 7, 8, 9, 10, or 11 mutations, e.g., substitutions, additions, or deletions), and/or a VHFWR4 amino acid sequence of SEQ ID NO: 6046.

[0840] In some embodiments, the antigen binding domain that targets NKp30 comprises a VL comprising a light chain framework region 1 (VLFWR1) amino acid sequence of SEQ ID NO: 6101, a VLFWR2 amino acid sequence of SEQ ID NO: 6102, a VLFWR3 amino acid sequence of SEQ ID NO: 6103, and/or a VLFWR4 amino acid sequence of SEQ ID NO: 6104.

[0841] In some embodiments, the antigen binding domain that targets NKp30 comprises a VL comprising a VLFWR1 amino acid sequence of SEQ ID NO: 6101 (or a sequence with no more than 1, 2, or 3 mutations, e.g., substitutions, additions, or deletions), a VLFWR2 amino acid sequence of SEQ ID NO: 6102 (or a sequence with no more than 1 mutation, e.g., substitution, addition, or deletion), a VLFWR3 amino acid sequence of SEQ ID NO: 6103 (or a sequence with no more than 1 mutation, e.g., substitution, addition, or deletion), and/or a VLFWR4 amino acid sequence of SEQ ID NO: 6104.

[0842] In some embodiments, the antigen binding domain that targets NKp30 comprises a VH comprising a heavy chain framework region 1 (VHFWR1) amino acid sequence of SEQ ID NO: 6047, a VHFWR2 amino acid sequence of SEQ ID NO: 6048, a VHFWR3 amino acid sequence of SEQ ID NO: 6049, and/or a VHFWR4 amino acid sequence of SEQ ID NO: 6050.

[0843] In some embodiments, the antigen binding domain that targets NKp30 comprises a VH comprising a VHFWR1 amino acid sequence of SEQ ID NO: 6047 (or a sequence with no more than 1, 2, 3, 4, 5, or 6 mutations, e.g., substitutions, additions, or deletions, therefrom), a VHFWR2 amino acid sequence of SEQ ID NO: 6048 (or a sequence with no more than 1, 2, 3, 4, 5, or 6 mutations, e.g., substitutions, additions, or deletions, therefrom), a VHFWR3 amino acid sequence of SEQ ID NO: 6049 (or a sequence with no more than 1, 2, 3, 4, 5, 6, 7, 8, 9, 10, or 11 mutations, e.g., substitutions, additions, or deletions), and/or a VHFWR4 amino acid sequence of SEQ ID NO: 6050.

[0844] In some embodiments, the antigen binding domain that targets NKp30 comprises a VL comprising a light chain framework region 1 (VLFWR1) amino acid sequence of SEQ ID NO: 6105, a VLFWR2 amino acid sequence of SEQ ID NO: 6106, a VLFWR3 amino acid sequence of SEQ ID NO: 6107, and/or a VLFWR4 amino acid sequence of SEQ ID NO: 6108.

[0845] In some embodiments, the antigen binding domain that targets NKp30 comprises a VL comprising a VLFWR1 amino acid sequence of SEQ ID NO: 6105 (or a sequence with no more than 1, 2, or 3 mutations, e.g., substitutions, additions, or deletions), a VLFWR2 amino acid sequence of SEQ ID NO: 6106 (or a sequence with no more than 1 mutation, e.g., substitution, addition, or deletion), a VLFWR3 amino acid sequence of SEQ ID NO: 6107 (or a sequence with no more than 1 mutation, e.g., substitution, addition, or deletion), and/or a VLFWR4 amino acid sequence of SEQ ID NO: 6108.

[0846] In some embodiments, the antigen binding domain that targets NKp30 comprises a VH comprising a heavy chain framework region 1 (VHFWR1) amino acid sequence of SEQ ID NO: 6051, a VHFWR2 amino acid sequence of SEQ ID NO: 6052, a VHFWR3 amino acid sequence of SEQ ID NO: 6053, and/or a VHFWR4 amino acid sequence of SEQ ID NO: 6054.

[0847] In some embodiments, the antigen binding domain that targets NKp30 comprises a VH comprising a VHFWR1 amino acid sequence of SEQ ID NO: 6051 (or a sequence with no more than 1, 2, 3, 4, 5, or 6 mutations, e.g., substitutions, additions, or deletions, therefrom), a VHFWR2 amino acid sequence of SEQ ID NO: 6052 (or a sequence with no more than 1, 2, 3, 4, 5, or 6 mutations, e.g., substitutions, additions, or deletions, therefrom), a VHFWR3 amino acid sequence of SEQ ID NO: 6053 (or a sequence with no more than 1, 2, 3, 4, 5, 6, 7, 8, 9, 10, or 11 mutations, e.g., substitutions, additions, or deletions), and/or a VHFWR4 amino acid sequence of SEQ ID NO: 6054.

[0848] In some embodiments, the antigen binding domain that targets NKp30 comprises a VL comprising a light chain framework region 1 (VLFWR1) amino acid sequence of SEQ ID NO: 6109, a VLFWR2 amino acid sequence of SEQ ID NO: 6110, a VLFWR3 amino acid sequence of SEQ ID NO: 6111, and/or a VLFWR4 amino acid sequence of SEQ ID NO: 6112.

[0849] In some embodiments, the antigen binding domain that targets NKp30 comprises a VL comprising a VLFWR1 amino acid sequence of SEQ ID NO: 6109 (or a sequence with no more than 1, 2, or 3 mutations, e.g., substitutions, additions, or deletions), a VLFWR2 amino acid sequence of SEQ ID NO: 6110 (or a sequence with no more than 1 mutation, e.g., substitution, addition, or deletion), a VLFWR3 amino acid sequence of SEQ ID NO: 6111 (or a sequence with no more than 1 mutation, e.g., substitution, addition, or deletion), and/or a VLFWR4 amino acid sequence of SEQ ID NO: 6112.

[0850] In some embodiments, the antigen binding domain that targets NKp30 comprises a VH comprising a heavy chain framework region 1 (VHFWR1) amino acid sequence of SEQ ID NO: 6055, a VHFWR2 amino acid sequence of SEQ ID NO: 6056, a VHFWR3 amino acid sequence of SEQ ID NO: 6057, and/or a VHFWR4 amino acid sequence of SEQ ID NO: 6058.

[0851] In some embodiments, the antigen binding domain that targets NKp30 comprises a VH comprising a VHFWR1 amino acid sequence of SEQ ID NO: 6055 (or a sequence with no more than 1, 2, 3, 4, 5, or 6 mutations, e.g., substitutions, additions, or deletions, therefrom), a VHFWR2 amino acid sequence of SEQ ID NO: 6056 (or a sequence with no more than 1, 2, 3, 4, 5, or 6 mutations, e.g., substitutions, additions, or deletions, therefrom), a VHFWR3 amino acid sequence of SEQ ID NO: 6057 (or a sequence with no more than 1, 2, 3, 4, 5, 6, 7, 8, 9, 10, or 11 mutations, e.g., substitutions, additions, or deletions), and/or a VHFWR4 amino acid sequence of SEQ ID NO: 6058.

[0852] In some embodiments, the antigen binding domain that targets NKp30 comprises a VL comprising a light chain framework region 1 (VLFWR1) amino acid sequence of SEQ ID NO: 6113, a VLFWR2 amino acid sequence of SEQ ID NO: 6114, a VLFWR3 amino acid sequence of SEQ ID NO: 6115, and/or a VLFWR4 amino acid sequence of SEQ ID NO: 6116.

[0853] In some embodiments, the antigen binding domain that targets NKp30 comprises a VL comprising a VLFWR1 amino acid sequence of SEQ ID NO: 6113 (or a sequence with no more than 1, 2, or 3 mutations, e.g., substitutions, additions, or deletions), a VLFWR2 amino acid sequence of SEQ ID NO: 6114 (or a sequence with no more than 1 mutation, e.g., substitution, addition, or deletion), a VLFWR3 amino acid sequence of SEQ ID NO: 6115 (or a sequence with no more than 1 mutation, e.g., substitution, addition, or deletion), and/or a VLFWR4 amino acid sequence of SEQ ID NO: 6116.

[0854] In some embodiments, the antigen binding domain that targets NKp30 comprises a VH comprising a heavy chain framework region 1 (VHFWR1) amino acid sequence of SEQ ID NO: 6059, a VHFWR2 amino acid sequence of SEQ ID NO: 6060, a VHFWR3 amino acid sequence of SEQ ID NO: 6061, and/or a VHFWR4 amino acid sequence of SEQ ID NO: 6062.

[0855] In some embodiments, the antigen binding domain that targets NKp30 comprises a VH comprising a VHFWR1 amino acid sequence of SEQ ID NO: 6059 (or a sequence with no more than 1, 2, 3, 4, 5, or 6 mutations, e.g., substitutions, additions, or deletions, therefrom), a VHFWR2 amino acid sequence of SEQ ID NO: 6060 (or a sequence with no more than 1, 2, 3, 4, 5, or 6 mutations, e.g., substitutions, additions, or deletions, therefrom), a VHFWR3 amino acid sequence of SEQ ID NO: 6061 (or a sequence with no more than 1, 2, 3, 4, 5, 6, 7, 8, 9, 10, or 11 mutations, e.g., substitutions, additions, or deletions), and/or a VHFWR4 amino acid sequence of SEQ ID NO: 6062.

[0856] In some embodiments, the antigen binding domain that targets NKp30 comprises a VL comprising a light chain framework region 1 (VLFWR1) amino acid sequence of SEQ ID NO: 6117, a VLFWR2 amino acid sequence of SEQ ID NO: 6118, a VLFWR3 amino acid sequence of SEQ ID NO: 6119, and/or a VLFWR4 amino acid sequence of SEQ ID NO: 6120.

[0857] In some embodiments, the antigen binding domain that targets NKp30 comprises a VL comprising a VLFWR1 amino acid sequence of SEQ ID NO: 6117 (or a sequence with no more than 1, 2, or 3 mutations, e.g., substitutions, additions, or deletions), a VLFWR2 amino acid sequence of SEQ ID NO: 6118 (or a sequence with no more than 1 mutation, e.g., substitution, addition, or deletion), a VLFWR3 amino acid sequence of SEQ ID NO: 6119 (or a sequence with no more than 1 mutation, e.g., substitution, addition, or deletion), and/or a VLFWR4 amino acid sequence of SEQ ID NO: 6120.

[0858] In some embodiments, the antigen binding domain that targets NKp30 comprises a VH comprising the amino acid sequence of SEQ ID NO: 6148 (or an amino acid sequence having at least about 77%, 80%, 85%, 90%, 95%, or 99% sequence identity to SEQ ID NO: 6148). In some embodiments, the antigen binding domain that targets NKp30 comprises a VH comprising the amino acid sequence of SEQ ID NO: 6149 (or an amino acid sequence having at least about 77%, 80%, 85%, 90%, 95%, or 99% sequence identity to SEQ ID NO: 6149). In some embodiments, the antigen binding domain that targets NKp30 comprises a VL comprising the amino acid sequence of SEQ ID NO: 6150 (or an amino acid sequence having at least about 93%, 95%, or 99% sequence identity to SEQ ID NO: 6150). In some embodiments, antigen binding domain that targets NKp30 comprises a VH comprising the amino acid sequence of SEQ ID NO: 6148. In some embodiments, antigen binding domain that targets NKp30 comprises a VH comprising the amino acid sequence of SEQ ID NO: 6149. In some embodiments, the antigen binding domain that targets NKp30 comprises a VL comprising the amino acid sequence of SEQ ID NO: 6150.

[0859] In some embodiments, the antigen binding domain that targets NKp30 comprises a VH comprising the amino acid sequence of SEQ ID NO: 6148, and a VL comprising the amino acid sequence of SEQ ID NO: 6150. In some embodiments, the antigen binding domain that targets NKp30 comprises a VH comprising the amino acid sequence of SEQ ID NO: 6149, and a VL comprising the amino acid sequence of SEQ ID NO: 6150.

[0860] In some embodiments, the antigen binding domain that targets NKp30 comprises a VH comprising the amino acid sequence of SEQ ID NO: 6151 (or an amino acid sequence having at least about 77%, 80%, 85%, 90%, 95%, or 99% sequence identity to SEQ ID NO: 6151). In some embodiments, the antigen binding domain that targets NKp30 comprises a VH comprising the amino acid sequence of SEQ ID NO: 6152 (or an amino acid sequence having at least about 77%, 80%, 85%, 90%, 95%, or 99% sequence identity to SEQ ID NO: 6152). In some embodiments, the antigen binding domain that targets NKp30 comprises a VL comprising the amino acid sequence of SEQ ID NO: 6153 (or an amino acid sequence having at least about 93%, 95%, or 99% sequence identity to SEQ ID NO: 6153). In some embodiments, antigen binding domain that targets NKp30 comprises a VH comprising the amino acid sequence of SEQ ID NO: 6151. In some embodiments, antigen binding domain that targets NKp30 comprises a VH comprising the amino acid sequence of SEQ ID NO: 6152. In some embodiments, the antigen binding domain that targets NKp30 comprises a VL comprising the amino acid sequence of SEQ ID NO: 6153.

[0861] In some embodiments, the antigen binding domain that targets NKp30 comprises a VH comprising the amino acid sequence of SEQ ID NO: 6151, and a VL comprising the amino acid sequence of SEQ ID NO: 6153. In some embodiments, the antigen binding domain that targets NKp30 comprises a VH comprising the amino acid sequence of SEQ ID NO: 6152, and a VL comprising the amino acid sequence of SEQ ID NO: 6153.

[0862] In some embodiments, the antigen binding domain that targets NKp30 comprises an scFv. In some embodiments, the scFv comprises an amino acid sequence selected from SEQ ID NOs: 6187-6190, or an amino acid sequence having at least about 93%, 95%, or 99% sequence identity thereto.

TABLE 7
Exemplary heavy chain CDRs and FWRs of NKp30-targeting antigen binding domains

| Ab | | VHCDR | | | | VHCDR | |
|---|---|---|---|---|---|---|---|
| ID | VHFWR1 | 1 | VHFWR2 | VHCDR2 | VHFWR3 | 3 | VHFWR4 |
| 9G1- | QIQLQESG | TGGYH | WIRQFP | YIYSSGS | RISITRDTS | GNWHY | WGQGT |
| HC | PGLVKPS | WN | GKKLEW | TSYNPSL | KNQFFLQL | FDF | MVTVSS |
| | QSLSLTCS | (SEQ ID | MG (SEQ | KS (SEQ | NSVTTEDT | (SEQ ID | (SEQ ID |
| | VTGFSIN | NO: | ID NO: | ID NO: | ATYYCAR | NO: | NO: 6006) |
| | (SEQ ID | 6000) | 6004) | 6001) | (SEQ ID | 6002) | |
| | NO: 6003) | | | | NO: 6005) | | |
| 15H6- | QIQLQESG | TGGYH | WIRQFP | YIYSSGT | RISITRDTS | GNWHY | WGQGT |
| HC | PGLVKPS | WN | GKKLEW | TRYNPSL | KNQFFLQL | FDY | LVAVSS |
| | QSLSLTCS | (SEQ ID | MG (SEQ | KS (SEQ | NSVTPEDT | (SEQ ID | (SEQ ID |
| | VTGFSIN | NO: | ID NO: | ID NO: | ATYYCTR | NO: | NO: 6013) |
| | (SEQ ID | 6007) | 6011) | 6008) | (SEQ ID | 6009) | |
| | NO: 6010) | | | | NO: 6012) | | |
| 9G1- | QIQLQESG | TGGYH | WIRQPA | YIYSSGS | RVTMSRD | GNWHY | WGQGT |
| HC_1 | PGLVKPSE | WN | GKGLEW | TSYNPSL | TSKNQFSL | FDF | MVTVSS |
| | TLSLTCTV | (SEQ ID | IG (SEQ | KS (SEQ | KLSSVTAA | (SEQ ID | (SEQ ID |
| | SGFSIN | NO: | ID NO: | ID NO: | DTAVYYC | NO: | NO: 6017) |
| | (SEQ ID | 6000) | 6015) | 6001) | AR | 6002) | |
| | NO: 6014) | | | | (SEQ ID | | |
| | | | | | NO: 6016) | | |
| 9G1- | QIQLQESG | TGGYH | WIRQHP | YIYSSGS | LVTISRDT | GNWHY | WGQGT |
| HC_2 | PGLVKPS | WN | GKGLEW | TSYNPSL | SKNQFSLK | FDF | MVTVSS |
| | QTLSLTCT | (SEQ ID | IG (SEQ | KS (SEQ | LSSVTAAD | (SEQ ID | (SEQ ID |
| | VSGFSIN | NO: | ID NO: | ID NO: | TAVYYCA | NO: | NO: 6021) |
| | (SEQ ID | 6000) | 6019) | 6001) | R | 6002) | |
| | NO: 6018) | | | | (SEQ ID | | |
| | | | | | NO: 6020) | | |
| 9G1- | EIQLLESG | TGGYH | WVRQAP | YIYSSGS | RFTISRDTS | GNWHY | WGQGT |
| HC_3 | GGLVQPG | WN | GKGLEW | TSYNPSL | KNTFYLQ | FDF | MVTVSS |
| | GSLRLSCA | (SEQ ID | VG (SEQ | KS (SEQ | MNSLRAE | (SEQ ID | (SEQ ID |
| | VSGFSIN | NO: | ID NO: | ID NO: | DTAVYYC | NO: | NO: 6025) |
| | (SEQ ID | 6000) | 6023) | 6001) | AR | 6002) | |
| | NO: 6022) | | | | (SEQ ID | | |
| | | | | | NO: 6024) | | |
| 9G1- | QIQLVQSG | TGGYH | WVRQAP | YIYSSGS | RVTITRDT | GNWHY | WGQGT |
| HC_4 | AEVKKPG | WN | GQGLEW | TSYNPSL | STNTFYME | FDF | MVTVSS |
| | SSVKVSC | (SEQ ID | MG (SEQ | KS (SEQ | LSSLRSED | (SEQ ID | (SEQ ID |
| | KVSGFSIN | NO: | ID NO: | ID NO: | TAVYYCA | NO: | NO: 6029) |
| | (SEQ ID | 6000) | 6027) | 6001) | R | 6002) | |
| | NO: 6026) | | | | (SEQ ID | | |
| | | | | | NO: 6028) | | |
| 9G1- | EIQLVESG | TGGYH | WVRQAP | YIYSSGS | RFT1SRDT | GNWHY | WGQGT |
| HC_5 | GGLVQPG | WN | GKGLEW | TSYNPSL | AKNSFYL | FDF | MVTVSS |
| | GSLRLSCA | (SEQ ID | VG (SEQ | KS (SEQ | QMNSLRA | (SEQ ID | (SEQ ID |
| | VSGFSIN | NO: | ID NO: | ID NO: | EDTAVYY | NO: | NO: 6034) |
| | (SEQ ID | 6000) | 6032) | 6001) | CAR (SEQ | 6002) | |
| | NO: 6030) | | | | ID NO: | | |
| | | | | | 6033) | | |
| 9G1- | QIQLVQSG | TGGYH | WVRQAP | YIYSSGS | RVTMTRD | GNWHY | WGQGT |
| HC_6 | AEVKKPG | WN | GQGLEW | TSYNPSL | TSTNTFYM | FDF | MVTVSS |
| | ASVKVSC | (SEQ ID | MG (SEQ | KS (SEQ | ELSSLRSE | (SEQ ID | (SEQ ID |
| | KVSGFSIN | NO: | ID NO: | ID NO: | DTAVYYC | NO: | NO: 6038) |
| | (SEQ ID | 6000) | 6036) | 6001) | AR | 6002) | |
| | NO: 6035) | | | | (SEQ ID | | |
| | | | | | NO: 6037) | | |
| 15H6- | QIQLQESG | TGGYH | WIRQHP | YIYSSGT | LVTISRDT | GNWHY | WGQGT |
| HC_1 | PGLVKPS | WN | GKGLEW | TRYNPSL | SKNQFSLK | FDY | LVTVSS |
| | QTLSLTCT | (SEQ ID | IG (SEQ | KS (SEQ | LSSVTAAD | (SEQ ID | (SEQ ID |
| | VSGFSIN | NO: | ID NO: | ID NO: | TAVYYCA | NO: | NO: 6042) |
| | (SEQ ID | 6007) | 6040) | 6008) | R (SEQ ID | 6009) | |
| | NO: 6039) | | | | NO: 6041) | | |
| 15H6- | QIQLQESG | TGGYH | W1RQPA | YIYSSGT | RVTMSRD | GNWHY | WGQGT |
| HC 2 | PGLVKPSE | WN | GKGLEW | TRYNPSL | TSKNQFSL | FDY | LVTVSS |
| | TLSLTCTV | (SEQ ID | IG (SEQ | KS (SEQ | KLSSVTAA | (SEQ ID | (SEQ ID |
| | SGFSIN | NO: | ID NO: | ID NO: | DTAVYYC | NO: | NO: 6046) |
| | (SEQ ID | 6007) | 6044) | 6008) | AR | 6009) | |
| | NO: 6043) | | | | (SEQ ID | | |
| | | | | | NO: 6045) | | |
| 15H6- | EIQLLESG | TGGYH | WVRQAP | YIYSSGT | RFTISRDTS | GNWHY | WGQGT |
| HC 3 | GGLVQPG | WN | GKGLEW | TRYNPSL | KNTFYLQ | FDY | LVTVSS |
| | GSLRLSCA | (SEQ ID | VG (SEQ | KS (SEQ | MNSLRAE | (SEQ ID | (SEQ ID |
| | VSGFSIN | NO: | ID NO: | ID NO | DTAVYYC | NO: | NO: 6050) |
| | (SEQ ID | 6007) | 6048) | 6008) | AR | 6009) | |
| | NO: 6047) | | | | (SEQ ID | | |
| | | | | | NO: 6049) | | |
| 15H6- | QIQLVESG | TGGYH | WIRQAP | YIYSSGT | RFTISRDT | GNWHY | WGQGT |
| HC_4 | GGLVKPG | WN | GKGLEW | TRYNPSL | AKNSFYL | FDY | LVTVSS |
| | GSLRLSCA | (SEQ ID | VG (SEQ | KS (SEQ | QMNSLRA | (SEQ ID | (SEQ ID |
| | VSGFSIN | NO: | ID NO: | ID NO: | EDTAVYY | NO: | NO: 6054) |
| | (SEQ ID | 6007) | 6052) | 6008) | CAR | 6009) | |
| | NO: 6051) | | | | (SEQ | | |
| | | | | | ID NO: | | |
| | | | | | 6053) | | |
| 15H6- | QIQLVQSG | TGGYH | WVRQAP | YIYSSGT | RVTMTRD | GNWHY | WGQGT |
| HC_5 | AEVKKPG | WN | GQGLEW | TRYNPSL | TSTNTFYM | FDY | LVTVSS |
| | ASVKVSC | (SEQ ID | MG (SEQ | KS (SEQ | ELSSLRSE | (SEQ ID | (SEQ ID |
| | KVSGFSIN | NO: | ID NO: | ID NO: | DTAVYYC | NO: | NO: 6058) |
| | (SEQ ID | 6007) | 6056) | 6008) | AR | 6009) | |
| | NO: 6055) | | | | (SEQ ID | | |
| | | | | | NO: 6057) | | |
| 15H6- | EIQLVQSG | TGGYH | WVQQAP | YIYSSGT | RVT1TRDT | GNWHY | WGQGT |
| HC_6 | AEVKKPG | WN | GKGLEW | TRYNPSL | STNTFYME | FDY | LVTVSS |
| | ATVKJSCK | (SEQ ID | MG (SEQ | KS (SEQ | LSSLRSED | (SEQ ID | (SEQ ID |
| | VSGFSIN | NO: | ID NO: | ID NO: | TAVYYCA | NO: | NO: 6062) |
| | (SEQ ID | 6007) | 6060) | 6008) | R | 6009) | |
| | NO: 6059) | | | | (SEQ ID | | |
| | | | | | NO: 6061) | | |

TABLE 18
Exemplary heavy chain CDRs and FWRs of NKp30-targeting antigen
binding domains (according to the Kabat numbering scheme)

| Ab | | VHCDR | | | | VHCDR | |
|---|---|---|---|---|---|---|---|
| ID | VHFWR1 | 1 | VHFWR2 | VHCDR2 | VHFWR3 | 3 | VHFWR4 |
| 9G1- | QIQLQESG | GYHWN | WIRQFP | YIYSSGS | RISITRDTS | GNWHY | WGQGT |
| HC | PGLVKPS | (SEQ ID | GKKLEW | TSYNPSL | KNQFFLQL | FDF | MVTVSS |
| | QSLSLTCS | NO: | MG (SEQ | KS (SEQ | NSVTTEDT | (SEQ ID | (SEQ ID |
| | VTGFSINT | 7313) | ID NO: | ID NO: | ATYYCAR | NO: | NO: 6006) |
| | G (SEQ ID | | 6004) | 6001) | (SEQ ID | 6002) | |
| | NO: 7317) | | | | NO: 6005) | | |
| 15H6- | QIQLQESG | GYHWN | WIRQFP | YIYSSGT | RISITRDTS | GNWHY | WGQGT |
| HC | PGLVKPS | (SEQ ID | GKKLEW | TRYNPSL | KNQFFLQL | FDY | LVAVSS |
| | QSLSLTCS | NO: | MG (SEQ | KS (SEQ | NSVTPEDT | (SEQ ID | (SEQ ID |
| | VTGFSINT | 7313) | ID NO: | ID NO: | ATYYCTR | NO: | NO: 6013) |
| | G (SEQ ID | | 6011) | 6008) | (SEQ ID | 6009) | |
| | NO: 7317) | | | | NO: 6012) | | |
| 9G1- | QIQLQESG | GYHWN | W1RQPA | YIYSSGS | RVTMSRD | GNWHY | WGQGT |
| HC_1 | PGLVKPSE | (SEQ ID | GKGLEW | TSYNPSL | TSKNQFSL | FDF | MVTVSS |
| | TLSLTCTV | NO: | IG (SEQ | KS (SEQ | KLSSVTAA | (SEQ ID | (SEQ ID |
| | SGFSINTG | 7313) | ID NO: | ID NO: | DTAVYYC | NO: | NO: 6017) |
| | (SEQ ID | | 6015) | 6001) | AR (SEQ ID | 6002) | |
| | NO: 7371) | | | | NO: 6016) | | |
| 9G1- | QIQLQESG | GYHWN | WIRQHP | YIYSSGS | LVTISRDT | GNWHY | WGQGT |
| HC_2 | PGLVKPS | (SEQ ID | GKGLEW | TSYNPSL | SKNQFSLK | FDF | MVTVSS |
| | QTLSLTCT | NO: | IG (SEQ | KS (SEQ | LSSVTAAD | (SEQ ID | (SEQ ID |
| | VSGFSINT | 7313) | ID NO: | ID NO | TAVYYCA | NO: | NO: 6021) |
| | G (SEQ ID | | 6019) | 6001) | R (SEQ ID | 6002) | |
| | NO: 7372) | | | | NO: 6020) | | |
| 9G1- | EIQLLESG | GYHWN | WVRQAP | YIYSSGS | RFTISRDTS | GNWHY | WGQGT |
| HC_3 | GGLVQPG | (SEQ ID | GKGLEW | TSYNPSL | KNTFYLQ | FDF | MVTVSS |
| | GSLRLSCA | NO: | VG (SEQ | KS (SEQ | MNSLRAE | (SEQ ID | (SEQ ID |
| | VSGFSINT | 7313) | ID NO: | ID NO: | DTAVYYC | NO: | NO: 6025) |
| | G (SEQ ID | | 6023) | 6001) | AR (SEQ ID | 6002) | |
| | NO: 7373) | | | | NO: 6024) | | |
| 9G1- | QIQLVQSG | GYHWN | WVRQAP | YIYSSGS | RVTITRDT | GNWHY | WGQGT |
| HC_4 | AEVKKPG | (SEQ ID | GQGLEW | TSYNPSL | STNTFYME | FDF | MVTVSS |
| | SSVKVSC | NO: | MG (SEQ | KS (SEQ | LSSLRSED | (SEQ ID | (SEQ ID |
| | KVSGFSIN | 7313) | ID NO: | ID NO: | TAVYYCA | NO: | NO: 6029) |
| | TG (SEQ ID | | 6027) | 6001) | R(SEQ ID | 6002) | |
| | NO: 7374) | | | | NO: 6028) | | |
| 9G1- | E1QLVESG | GYHWN | WVRQAP | YIYSSGS | RFTISRDT | GNWHY | WGQGT |
| HC_5 | GGLVQPG | (SEQ ID | GKGLEW | TSYNPSL | AKNSFYL | FDF | MVTVSS |
| | GSLRLSCA | NO: | VG (SEQ | KS (SEQ | QMNSLRA | (SEQ ID | (SEQ ID |
| | VSGFSINT | 7313) | ID NOL | ID NO: | EDTAVYY | NO: | NO: 6034) |
| | G (SEQ ID | | 6032) | 6001) | CAR (SEQ | 6002) | |
| | NO: 7375) | | | | ID NO: | | |
| | | | | | 6033) | | |
| 9G1- | QIQLVQSG | GYHWN | WVRQAP | YIYSSGS | RVTMTRD | GNWHY | WGQGT |
| HC_6 | AEVKKPG | (SEQ ID | GQGLEW | TSYNPSL | TSTNTFYM | FDF | MVTVSS |
| | ASVKVSC | NO: | MG (SEQ | KS (SEQ | ELSSLRSE | (SEQ ID | (SEQ ID |
| | KVSGFSIN | 7313) | ID NO: | ID NO: | DTAVYYC | NO: | NO: 6038) |
| | TG (SEQ ID | | 6036) | 6001) | AR (SEQ ID | 6002) | |
| | NO: 7376) | | | | NO: 6037) | | |
| 15H6- | QIQLQESG | GYHWN | WIRQHP | YIYSSGT | LVTISRDT | GNWHY | WGQGT |
| HC_1 | PGLVKPS | (SEQ ID | GKGLEW | TRYNPSL | SKNQFSLK | FDY | LVTVSS |
| | QTLSLTCT | NO: | IG (SEQ | KS (SEQ | LSSVTAAD | (SEQ ID | (SEQ ID |
| | VSGFSINT | 7313) | ID NO: | ID NO: | TAVYYCA | NO: | NO: 6042) |
| | G (SEQ ID | | 6040) | 6008) | R (SEQ ID | 6009) | |
| | NO: 7372) | | | | NO: 6041) | | |
| 15H6- | QIQLQESG | GYHWN | WIRQPA | YIYSSGT | RVTMSRD | GNWHY | WGQGT |
| HC_2 | PGLVKPSE | (SEQ ID | GKGLEW | TRYNPSL | TSKNQFSL | FDY | LVTVSS |
| | TLSLTCTV | NO: | IG (SEQ | KS (SEQ | KLSSVTAA | (SEQ ID | (SEQ ID |
| | SGFSINTG | 7313) | ID NO: | ID NO: | DTAVYYC | NO: | NO: 6046) |
| | (SEQ ID | | 6044) | 6008) | AR | 6009) | |
| | NO: 7371) | | | | (SEQ ID | | |
| | | | | | NO: 6045) | | |
| 15H6- | E1QLLESG | GYHWN | WVRQAP | YIYSSGT | RFTISRDTS | GNWHY | WGQGT |
| HC_3 | GGLVQPG | (SEQ ID | GKGLEW | TRYNPSL | KNTFYLQ | FDY | LVTVSS |
| | GSLRLSCA | NO: | VG (SEQ | KS (SEQ | MNSLRAE | (SEQ ID | (SEQ ID |
| | VSGFSINT | 7313) | ID NO: | ID NO: | DTAVYYC | NO: | NO: 6050) |
| | G (SEQ ID | | 6048) | 6008) | AR | 6009) | |
| | NO: 7373) | | | | (SEQ ID | | |
| | | | | | NO: 6049) | | |
| 15H6- | QIQLVESG | GYHWN | WIRQAP | YIYSSGT | RFTISRDT | GNWHY | WGQGT |
| HC_4 | GGLVKPG | (SEQ ID | GKGLEW | TRYNPSL | AKNSFYL | FDY | LVTVSS |
| | GSLRLSCA | NO: | VG (SEQ | KS (SEQ | QMNSLRA | (SEQ ID | (SEQ ID |
| | VSGFSINT | 7313) | ID NO: | ID NO | EDTAVYY | NO: | NO: 6054) |
| | G (SEQ ID | | 6052) | 6008) | CAR | 6009) | |
| | NO: 7377) | | | | (SEQ | | |
| | | | | | ID NO: | | |
| | | | | | 6053) | | |
| 15H6- | QIQLVQSG | GYHWN | WVRQAP | YIYSSGT | RVTMTRD | GNWHY | WGQGT |
| HC_5 | AEVKKPG | (SEQ ID | GQGLEW | TRYNPSL | TSTNTFYM | FDY | LVTVSS |
| | ASVKVSC | NO: | MG (SEQ | KS (SEQ | ELSSLRSE | (SEQ ID | (SEQ ID |
| | KVSGFSIN | 7313) | ID NO: | ID NO: | DTAVYYC | NO: | NO: 6058) |
| | TG (SEQ ID | | 6056) | 6008) | AR (SEQ ID | 6009) | |
| | NO: 7376) | | | | NO: 6057) | | |
| 15H6- | EIQLVQSG | GYHWN | WVQQAP | YIYSSGT | RVTITRDT | GNWHY | WGQGT |
| HC_6 | AEVKKPG | (SEQ ID | GKGLEW | TRYNPSL | STNTFYME | FDY | LVTVSS |
| | ATVKISCK | NO: | MG (SEQ | KS (SEQ | LSSLRSED | (SEQ ID | (SEQ ID |
| | VSGFSINT | 7313) | ID NO: | ID NO: | TAVYYCA | NO: | NO: 6062) |
| | G (SEQ ID | | 6060) | 6008) | R | 6009) | |
| | NO: 7378) | | | | (SEQ ID | | |
| | | | | | NO: 6061) | | |
| 9D9- | QIQLQESG | GYHWN | WIRQFP | YIYSSGT | RISITRDTS | GDWHY | WGQGT |
| HC | PGLVKPS | (SEQ ID | GKKVE | TKYNPSL | KNQFFLQL | FDY | MVAVSS |
| | QSLSLSCS | NO: | WMG | KS (SEQ | NSVTTEDT | (SEQ ID | (SEQ ID |
| | VTGFSINT | 7313) | (SEQ ID | ID NO: | ATYYCAR | NO: | NO: 7316) |
| | G (SEQ ID | | NO: 7314) | 7385) | (SEQ ID | 7315) | |
| | NO: 7312) | | | | NO: 6005) | | |
| 3A12- | QIQLQESG | GYHWN | WIRQFP | YIYSSGS | RFSITRDTS | GNWHY | WGQGT |
| HC | PGLVKPS | (SEQ ID | GKKLEW | TRYNPSL | KNQFFLQL | FDY | LVAVSS |
| | QSLSLTCS | NO: | MG (SEQ | KS (SEQ | NSVTTEDT | (SEQ ID | (SEQ ID |
| | VTGFSINT | 7313) | ID NO: | ID NO: | ATYYCTR | NO: | NO: 6013) |
| | G (SEQ ID | | 6004) | 7318) | (SEQ ID | 6009) | |
| | NO: 7317) | | | | NO: 7319) | | |
| 12D10- | QIQLQESG | GYHWN | WIRQFP | YIYSSGT | RISITRDTS | GNWHY | WGQGT |
| HC | PGLVKPS | (SEQ ID | GKKLEW | TRYNPSL | KNQFFLQL | FDY | LVAVSS |
| | QSLSLTCS | NO: | MG (SEQ | KS (SEQ | NSVTPEDT | (SEQ ID | (SEQ ID |
| | VTGFSINT | 7313) | ID NO: | ID NO: | ATYYCTR | NO: | NO: 6013) |
| | G (SEQ ID | | 6004) | 6008) | (SEQ ID | 6009) | |
| | NO: 7317) | | | | NO: 6012) | | |
| 15E1- | QIQLQESG | GYHWN | WIRQFP | YIYSSGS | RFSITRDTS | GDWHY | WGPGT |
| HC | PGLVKPS | (SEQ ID | GKKLEW | TSYNPSL | KNQFFLQL | FDY | MVTVSS |
| | QSLSLSCS | NO: | MG (SEQ | KS (SEQ | NSVTTEDT | (SEQ ID | (SEQ ID |
| | VTGFSITT | 7313) | ID NO: | ID NO: | ATYYCAR | NO: | NO: 7324) |
| | T (SEQ ID | | 6004) | 6001) | (SEQ ID | 7315) | |
| | NO: 7322) | | | | NO: 7323) | | |
| 15E1_ | QIQLQESG | GYHWN | WIRQHP | YIYSSGS | LVTISRDT | GDWHY | WGQGT |
| Humanized | PGLVKPS | (SEQ ID | GKGLEW | TSYNPSL | SKNQFSLK | FDY | MVTVSS |
| variant_ | QTLSLTCT | NO: | IG | KS (SEQ | LSSVTAAD | (SEQ ID | (SEQ ID |
| VH1 | VSGFSITT | 7313) | (SEQ | ID NO: | TAVYYCA | NO: | NO: 6006) |
| | T (SEQ ID | | ID NO: | 6001) | R | 7315) | |
| | NO: 7330) | | 6019) | | (SEQ ID | | |
| | | | | | NO: 6020) | | |
| 15E1_ | QIQLVESG | GYHWN | WIRQAP | YIYSSGS | RFTISRDT | GDWHY | WGQGT |
| Humanized | GGLVKPG | (SEQ ID | GKGLEW | TSYNPSL | AKNSFYL | FDY | MVTVSS |
| variant_ | GSLRLSCA | NO: | VG | KS (SEQ | QMNSLRA | (SEQ ID | (SEQ ID |
| VH2 | VSGFSITT | 7313) | (SEQ | ID NO | EDTAVYY | NO: | NO: 6006) |
| | T (SEQ ID | | ID NO: | 6001) | CAR (SEQ | 7315) | |
| | NO: 7331) | | 6052) | | ID NO: | | |
| | | | | | 6033) | | |
| 15E1_ | EIQLLESG | GYHWN | WVRQAP | YIYSSGS | RFTISRDTS | GDWHY | WGQGT |
| Humanized | GGLVQPG | (SEQ ID | GKGLEW | TSYNPSL | KNTFYLQ | FDY | MVTVSS |
| variant_ | GSLRLSCA | NO: | VG | KS (SEQ | MNSLRAE | (SEQ ID | (SEQ ID |
| VH3 | VSGFSITT | 7313) | (SEQ | ID NO: | DTAVYYC | NO: | NO: 6006) |
| | T (SEQ ID | | ID NO: | 6001) | AR | 7315) | |
| | NO: 7332) | | 6023) | | (SEQ ID | | |
| | | | | | NO: 6024) | | |
| 15E1_ | EIQLVESG | GYHWN | WVRQAP | YIYSSGS | RFTISRDT | GDWHY | WGQGT |
| Humanized | GGLVQPG | (SEQ ID | GKGLEW | TSYNPSL | AKNSFYL | FDY | MVTVSS |
| variant_ | GSLRLSCA | NO: | VG | KS (SEQ | QMNSLRA | (SEQ ID | (SEQ ID |
| VH4 | VSGFSITT | 7313) | (SEQ | ID NO: | EDTAVYY | NO: | NO: 6006) |
| | T (SEQ ID | | ID NO: | 6001) | CAR | 7315) | |
| | NO: 7333) | | 6023) | | (SEQ | | |
| | | | | | ID NO: | | |
| | | | | | 6033) | | |
| 15E1_ | QIQLVQSG | GYHWN | WVRQAP | YIYSSGS | RVTMTRD | GDWHY | WGQGT |
| Humanized | AEVKKPG | (SEQ ID | GQGLEW | TSYNPSL | TSTNTFYM | FDY | MVTVSS |
| variant_ | ASVKVSC | NO: | MG | KS | ELSSLRSE | (SEQ ID | (SEQ ID |
| VH5 | KVSGFSIT | 7313) | (SEQ | (SEQ | DTAVYYC | NO: | NO: 6006) |
| | TT (SEQ ID | | ID NO: | ID NO: | AR | 7315) | |
| | NO: 7334) | | 6027) | 6001) | (SEQ ID | | |
| | | | | | NO: 6037) | | |

TABLE 8
Exemplary light chain CDRs and FWRs of NKp30-targeting antigen binding domains

| Ab | | | | | | | |
|---|---|---|---|---|---|---|---|
| ID | VLFWR1 | VLCDR1 | VLFWR2 | VLCDR2 | VLFWR3 | VLCDR3 | VLFWR4 |
| 9G1- | SYTLTQPP | SGERLS | WYQQKP | ENDKRP | GIPDQFSG | QSWDS | FGSGTQ |
| LC | LLSVALG | DKYVH | GRAPVM | S (SEQ ID | SNSGNIAT | TNSAV | LTVL |
| | HKATITC | (SEQ ID | VIY (SEQ | NO: 6064) | LTISKAQA | (SEQ ID | (SEQ ID |
| | (SEQ ID | NO: | ID NO: | | GYEADYY | NO: | NO: 6069) |
| | NO: 6066) | 6063) | 6067) | | C | 7293) | |
| | | | | | (SEQ ID | | |
| | | | | | NO: 7292) | | |
| 15H6- | SYTLTQPP | SGENLS | WYQQKP | ENEKRPS | GIPDQFSG | HYWESI | FGSGTH |
| LC | SLSVAPG | DKYVH | GRAPVM | (SEQ ID | SNSGNIAT | NSW | LTVL |
| | QKATITC | (SEQ ID | VIY | NO: 6071) | LTISKAQP | (SEQ ID | (SEQ ID |
| | (SEQ ID | NO: | (SEQ | | GSEADYY | NO: | NO: 6076) |
| | NO: 6073) | 6070) | ID NO: | | C | 6072) | |
| | | | 6074) | | (SEQ ID | | |
| | | | | | NO: 6075) | | |
| 9G1- | QSVTTQPP | SGERLS | WYQQLP | ENDKRP | GVPDRFSG | QSWDS | FGGGTQ |
| LC_1 | SVSGAPG | DKYVH | GTAPKM | S (SEQ ID | SNSGNSAS | TNSAV | LTVL |
| | QRVTISC | (SEQ ID | LIY | NO: 6064) | LAITGLQA | (SEQ ID | (SEQ ID |
| | (SEQ ID | NO: | (SEQ | | EDEADYY | NO: | NO: 6080) |
| | NO: 6077) | 6063) | ID NO: | | C | 7293) | |
| | | | 6078) | | (SEQ ID | | |
| | | | | | NO: 6079) | | |
| 9G1- | QSVTTQPP | SGERLS | WYQQLP | ENDKRP | GVPDRFSG | QSWDS | FGGGTQ |
| LC_2 | SASGTPG | DKYVH | GTAPKM | S (SEQ ID | SNSGNSAS | TNSAV | LTVL |
| | QRVTISC | (SEQ ID | LIY | NO: 6064) | LAISGLQS | (SEQ ID | (SEQ ID |
| | (SEQ ID | NO: | (SEQ | | EDEADYY | NO: | NO: 6084) |
| | NO: 6081) | 6063) | ID NO: | | C | 7293) | |
| | | | 6082) | | (SEQ ID | | |
| | | | | | NO: 6083) | | |
| 9G1- | QSVTTQPP | SGERLS | WYQQLP | ENDKRP | GVPDRFSG | QSWDS | FGGGTQ |
| LC_3 | SASGTPG | DKYVH | GTAPKM | S (SEQ ID | SNSGNSAS | TNSAV | LTVL |
| | QRVTISC | (SEQ ID | LIY | NO: 6064) | LAISGLRS | (SEQ ID | (SEQ ID |
| | (SEQ ID | NO: | (SEQ | | EDEADYY | NO: | NO: 6088) |
| | NO: 6085) | 6063) | ID NO: | | C | 7293) | |
| | | | 6086) | | (SEQ ID | | |
| | | | | | NO: 6087) | | |
| 9G1- | SSETTQPH | SGERLS | WYQQKP | ENDKRP | GIPERFSGS | QSWDS | FGGGTQ |
| LC_4 | SVSVATA | DKYVH | GQDPVM | S (SEQ ID | NPGNTATL | TNSAV | LTVL |
| | QMARITC | (SEQ ID | VIY | NO: 6064) | TISRIEAGD | (SEQ ID | (SEQ ID |
| | (SEQ ID | NO: | (SEQ | | EADYYC | NO: | NO: 6092) |
| | NO: 6089) | 6063) | ID NO: | | (SEQ ID | 7293) | |
| | | | 6090) | | NO: 6091) | | |
| 9G1- | DIQMTQSP | SGERLS | WYQQKP | ENDKRP | GVPSRFSG | QSWDS | FGQGTK |
| LC 5 | STLSASVG | DKYVH | GKAPKM | S (SEQ ID | SNSGNEAT | TNSAV | VEIK |
| | DRVTITC | (SEQ ID | LIY | NO: 6064) | LTISSLQPD | (SEQ ID | (SEQ ID |
| | (SEQ ID | NO: | (SEQ | | DFATYYC | NO: | NO: 6096) |
| | NO: 6093) | 6063) | ID NO: | | (SEQ ID | 7293) | |
| | | | 6094) | | NO: 6095) | | |
| 15H6- | QYVLTQP | SGENLS | WYQQLP | ENEKRPS | GVPDRFSG | HYWESI | FGEGTE |
| LC_1 | PSASGTPG | DKYVH | GTAPKM | (SEQ ID | SNSGNSAS | NSW | LTVL |
| | QRVTISC | (SEQ ID | LIY | NO: 6071) | LAISGLQS | (SEQ ID | (SEQ ID |
| | (SEQ ID | NO: | (SEQ | | EDEADYY | NO: | NO: 6100) |
| | NO: 6097) | 6070) | ID NO: | | C | 6072) | |
| | | | 6098) | | (SEQ ID | | |
| | | | | | NO: 6099) | | |
| 15H6- | QYVLTQP | SGENLS | WYQQLP | ENEKRPS | GVPDRFSG | HYWESI | FGEGTE |
| LC_2 | PSASGTPG | DKYVH | GTAPKM | (SEQ ID | SNSGNSAS | NSW | LTVL |
| | QRVTISC | (SEQ ID | LIY | NO: 6071) | LAISGLRS | (SEQ ID | (SEQ ID |
| | (SEQ ID | NO: | (SEQ | | EDEADYY | NO: | NO: 6104) |
| | NO: 6101) | 6070) | ID NO: | | C | 6072) | |
| | | | 6102) | | (SEQ ID | | |
| | | | | | NO: 6103) | | |
| 15H6- | SYELTQPP | SGENLS | WYQQKP | ENEKRPS | GIPERFSGS | HYWESI | FGEGTE |
| LC_3 | SVSVSPGQ | DKYVH | GQSPVM | (SEQ ID | NSGNTATL | NSW | LTVL |
| | TASITC | (SEQ ID | VIY | NO: 6071) | TISGTQAM | (SEQ ID | (SEQ ID |
| | (SEQ ID | NO: | (SEQ | | DEADYYC | NO: | NO: 6108) |
| | NO: 6105) | 6070) | ID NO: | | (SEQ ID | 6072) | |
| | | | 6106) | | NO: 6107) | | |
| 15H6- | DYVLTQS | SGENLS | WYLQKP | ENEKRPS | GVPDRFSG | HYWESI | FGQGTK |
| LC_4 | PLSLPVTP | DKYVH | GQSPQM | (SEQ ID | SNSGNDA | NSW | VEIK |
| | GEPASISC | (SEQ ID | LIY | NO: 6071) | TLKISRVE | (SEQ ID | (SEQ ID |
| | (SEQ ID | NO: | (SEQ | | AEDVGVY | NO: | NO: 6112) |
| | NO: 6109) | 6070) | ID NO: | | YC (SEQ ID | 6072) | |
| | | | 6110) | | NO: 6111) | | |
| 15H6- | AYQLTQS | SGENLS | WYQQKP | ENEKRPS | GVPSRFSG | HYWESI | FGQGTK |
| LC_5 | PSSLSASV | DKYVH | GKAPKM | (SEQ ID | SNSGNDA | NSW | VEIK |
| | GDRVTITC | (SEQ ID | LIY | NO: 6071) | TLTISSLQP | (SEQ ID | (SEQ ID |
| | (SEQ ID | NO: | (SEQ | | EDFATYY | NO: | NO: 6116) |
| | NO: 6113) | 6070) | ID NO: | | C (SEQ ID | 6072) | |
| | | | 6114) | | NO: 6115) | | |
| 15H6- | EYVLTQSP | SGENLS | WYQQKP | ENEKRPS | GIPARFSG | HYWESI | FGQGTK |
| LC_6 | ATLSVSPG | DKYVH | GQAPRM | (SEQ ID | SNSGNEAT | NSW | VEIK |
| | ERATLSC | (SEQ ID | LIY | NO: 6071) | LTISSLQSE | (SEQ ID | (SEQ ID |
| | (SEQ ID | NO: | (SEQ | | DFAVYYC | NO: | NO: 6120) |
| | NO: 6117) | 6070) | ID NO: | | (SEQ ID | 6072) | |
| | | | 6118) | | NO: 6119) | | |
| 9D9- | SYTLTQPP | SGENLS | WYQQKP | ENDKRP | GIPDQFSG | HCWDS | FGSGTH |
| LC | LVSVALG | DKYVH | GRAPVM | S (SEQ ID | SNSGNIAT | TNSAV | LTVL |
| | QKATIIC | (SEQ ID | VIY | NO: 6064) | LTISKAQA | (SEQ ID | (SEQ ID |
| | (SEQ ID | NO: | (SEQ | | GYEADYY | NO: | NO: 6076) |
| | NO: 7320) | 6070) | ID NO: | | C (SEQ ID | 7321) | |
| | | | 6067) | | NO: 7292) | | |
| 3A12- | SYTLTQPP | SGENLS | WYQQKP | ENDKRP | GIPDQFSG | HCWDS | FGSGTH |
| LC | LVSVALG | DKYVH | GRAPVM | S (SEQ ID | SNSGNIAT | TNSAV | LTVL |
| | QKATIIC | (SEQ ID | VIY | NO: 6064) | LTISKAQA | (SEQ ID | (SEQ ID |
| | (SEQ ID | NO: | (SEQ | | GYEADYY | NO: | NO: 6076) |
| | NO: 7320) | 6070) | ID NO: | | C (SEQ ID | 7321) | |
| | | | 6067) | | NO: 7292) | | |
| 12D10- | SYTLTQPP | SGENLS | WYQQKP | ENEKRPS | GIPDQFSG | HYWESI | FGSGTH |
| LC | SLSVAPG | DKYVH | GRAPVM | (SEQ ID | SNSGNIAT | NSW | LTVL |
| | QKATIIC | (SEQ ID | VIY | NO: 6071) | LTISKAQP | (SEQ ID | (SEQ ID |
| | (SEQ ID | NO: | (SEQ | | GSEADYY | NO: | NO: 6076) |
| | NO: 6073) | 6070) | ID NO: | | C (SEQ ID | 6072) | |
| | | | 6074) | | NO: 6075) | | |
| 15E1- | SFTLTQPP | SGEKLS | WYQQKP | ENDRRPS | GIPDQFSG | QFWDS | FGGGTQ |
| LC | LVSVAVG | DKYVH | GRAPVM | (SEQ ID | SNSGNIAS | TNSAV | LTVL |
| | QVATITC | (SEQ ID | VIY | NO: 7327) | LTISKAQA | (SEQ ID | (SEQ ID |
| | (SEQ ID | NO: | (SEQ | | GDEADYF | NO: | NO: 6080) |
| | NO: 7325) | 7326) | ID NO: | | C (SEQ ID | 7329) | |
| | | | 6067) | | NO: 7328) | | |
| 15E1_ | SSETTQPP | SGEKLS | WYQQKP | ENDRRPS | GIPERFSGS | QFWDS | FGGGTQ |
| Humanized | SVSVSPGQ | DKYVH | GQSPVM | (SEQ ID | NSGNTATL | TNSAV | LTVL |
| variant_ | TASITC | (SEQ ID | VIY | NO: 7327) | TISGTQAM | (SEQ ID | (SEQ ID |
| VL1 | (SEQ ID | NO: | (SEQ | | DEADYFC | NO: | NO: 6080) |
| | NO: 7335) | 7326) | ID NO: | | (SEQ ID | 7329) | |
| | | | 6106) | | NO: 7336) | | |
| 15E1_ | SSETTQPH | SGEKLS | WYQQKP | ENDRRPS | GIPERFSGS | QFWDS | FGGGTQ |
| Humanized | SVSVATA | DKYVH | GQDPVM | (SEQ ID | NPGNTATL | TNSAV | LTVL |
| variant_ | QMAR1TC | (SEQ ID | VIY | NO: 7327) | TISRIEAGD | (SEQ ID | (SEQ ID |
| VL2 | (SEQ ID | NO: | (SEQ | | EADYFC | NO: | NO: 6080) |
| | NO: 6089) | 7326) | ID NO: | | (SEQ ID | 7329) | |
| | | | 6090) | | NO: 7337) | | |
| 15E1_ | QSVTTQPP | SGEKLS | WYQQLP | ENDRRPS | GVPDRFSG | QFWDS | FGGGTQ |
| Humanized | SASGTPG | DKYVH | GTAPKM | (SEQ ID | SNSGNSAS | TNSAV | LTVL |
| variant_ | QRVTISC | (SEQ ID | LIY | NO: 7327) | LAISGLRS | (SEQ ID | (SEQ ID |
| VL3 | (SEQ ID | NO: | (SEQ | | EDEADYF | NO: | NO: 6080) |
| | NO: 6081) | 7326) | ID NO: | | C | 7329) | |
| | | | 6078) | | (SEQ ID | | |
| | | | | | NO: 7338) | | |
| 15E1_ | QSVTTQPP | SGEKLS | WYQQLP | ENDRRPS | GVPDRFSG | QFWDS | FGGGTQ |
| Humanized | SVSGAPG | DKYVH | GTAPKM | (SEQ ID | SNSGNSAS | TNSAV | LTVL |
| variant_ | QRVTISC | (SEQ ID | LIY | NO: 7327) | LAITGLQA | (SEQ ID | (SEQ ID |
| VL4 | (SEQ ID | NO: | (SEQ | | EDEADYF | NO: | NO: 6080) |
| | NO: 6077) | 7326) | ID NO: | | C | 7329) | |
| | | | 6078) | | (SEQ ID | | |
| | | | | | NO: 7339) | | |
| 15E1_ | DSVTTQSP | SGEKLS | WYQQRP | ENDRRPS | GVPDRFSG | QFWDS | FGGGTK |
| Humanized | LSLPVTLG | DKYVH | GQSPRM | (SEQ ID | SNSGNDA | TNSAV | VEIK |
| variant_ | QPASISC | (SEQ ID | LIY | NO: 7327) | TLKISRVE | (SEQ ID | (SEQ ID |
| VL5 | (SEQ ID | NO: | (SEQ | | AEDVGVY | NO: | NO: 233) |
| | NO: 7340) | 7326) | ID NO: | | FC (SEQ ID | 7329) | |
| | | | 7341) | | NO: 7342) | | |

TABLE 9
Exemplary variable regions of NKp30-
targeting antigen binding domains

| SEQ | | Descrip- | |
|---|---|---|---|
| ID NO | Ab ID | tion | Sequence |
| SEQ | 9G1-HC | 9G1 | QIQLQESGPGLVKPSQ |
| ID NO: | | heavy | SLSLTCSVTGFSINTG |
| 6121 | | chain | GYHWNWIRQFPGKKLE |
| | | variable | WMGYIYSSGSTSYNPS |
| | | region | LKSRISITRDTSKNQF |
| | | | FLQLNSVTTEDTATYY |
| | | | CARGNWHYFDFWGQGT |
| | | | MVTVSS |
| SEQ | 15H6-HC | 15H6 | QIQLQESGPGLVKPSQ |
| ID NO: | | heavy | SLSLTCSVTGFSINTG |
| 6122 | | chain | GYHWNWIRQFPGKKLE |
| | | variable | WMGYIYSSGTTRYNPS |
| | | region | LKSRISITRDTSKNQF |
| | | | FLQLNSVTPEDTATYY |
| | | | CTRGNWHYFDYWGQGT |
| | | | LVAVSS |
| SEQ | 9G1-HC1 | 9G1 | QIQLQESGPGLVKPSE |
| ID NO: | | heavy | TLSLTCTVSGFSINTG |
| 6123 | | chain | GYHWNWIRQPAGKGLE |
| | | variable | WIGYIYSSGSTSYNPS |
| | | region | LKSRVTMSRDTSKNQF |
| | | humanized | SLKLSSVTAADTAVYY |
| | | variant 1 | CARGNWHYFDFWGQGT |
| | | | MVTVSS |
| SEQ | 9G1-HC2 | 9G1 | QIQLQESGPGLVKPSQ |
| ID NO: | | heavy | TLSLTCTVSGFSINTG |
| 6124 | | chain | GYHWNWIRQHPGKGLE |
| | | variable | WIGYIYSSGSTSYNPS |
| | | region | LKSLVTISRDTSKNQF |
| | | humanized | SLKLSSVTAADTAVYY |
| | | variant 2 | CARGNWHYFDFWGQGT |
| | | | MVTVSS |
| SEQ | 9G1-HC3 | 9G1 | EIQLLESGGGLVQPGG |
| ID NO: | | heavy | SLRLSCAVSGFSINTG |
| 6125 | | chain | GYHWNWVRQAPGKGLE |
| | | variable | WVGYIYSSGSTSYNPS |
| | | region | LKSRFTISRDTSKNTF |
| | | humanized | YLQMNSLRAEDTAVYY |
| | | variant 3 | CARGNWHYFDFWGQGT |
| | | | MVTVSS |
| SEQ | 9G1-HC4 | 9G1 | QIQLVQSGAEVKKPGS |
| ID NO: | | heavy | SVKVSCKVSGFSINTG |
| 6126 | | chain | GYHWNWVRQAPGQGLE |
| | | variable | WMGYIYSSGSTSYNPS |
| | | region | LKSRVTITRDTSTNTF |
| | | humanized | YMELSSLRSEDTAVYY |
| | | variant 4 | CARGNWHYFDFWGQGT |
| | | | MVTVSS |
| SEQ | 9G1-HC5 | 9G1 | EIQLVESGGGLVQPGG |
| ID NO: | | heavy | SLRLSCAVSGFSINTG |
| 6127 | | chain | GYHWNWVRQAPGKGLE |
| | | variable | WVGYIYSSGSTSYNPS |
| | | region | LKSRFTISRDTAKNSF |
| | | humanized | YLQMNSLRAEDTAVYY |
| | | variant 5 | CARGNWHYFDFWGQGT |
| | | | MVTVSS |
| SEQ | 9G1-HC6 | 9G | QIQLVQSGAEVKKPGA |
| ID NO: | | 1 heavy | SVKVSCKVSGFSINTG |
| 6128 | | chain | GYHWNWVRQAPGQGLE |
| | | variable | WMGYIYSSGSTSYNPS |
| | | region | LKSRVTMTRDTSTNTF |
| | | humanized | YMELSSLRSEDTAVYY |
| | | variant 6 | CARGNWHYFDFWGQGT |
| | | | MVTVSS |
| SEQ | 15H6- | 15H6 | QIQLQESGPGLVKPSQ |
| ID NO: | HC_1 | heavy | TLSLTCTVSGFSINTG |
| 6129 | | chain | GYHWNWIRQHPGKGLE |
| | | variable | WIGYIYSSGTTRYNPS |
| | | region | LKSLVTISRDTSKNQF |
| | | humanized | SLKLSSVTAADTAVYY |
| | | variant 1 | CARGNWHYFDYWGQGT |
| | | | LVTVSS |
| SEQ | 15H6- | 15H6 | QIQLQESGPGLVKPSE |
| ID NO: | HC_2 | heavy | TLSLTCTVSGFSINTG |
| 6130 | | chain | GYHWNWIRQPAGKGLE |
| | | variable | WIGYIYSSGTTRYNPS |
| | | region | LKSRVTMSRDTSKNQF |
| | | humanized | SLKLSSVTAADTAVYY |
| | | variant 2 | CARGNWHYFDYWGQGT |
| | | | LVTVSS |
| SEQ | 15H6- | 15H6 | EIQLLESGGGLVQPGG |
| ID NO: | HC_3 | heavy | SLRLSCAVSGFSINTG |
| 6131 | | chain | GYHWNWVRQAPGKGLE |
| | | variable | WVGYIYSSGTTRYNPS |
| | | region | LKSRFTISRDTSKNTF |
| | | humanized | YLQMNSLRAEDTAVYY |
| | | variant 3 | CARGNWHYFDYWGQGT |
| | | | LVTVSS |
| SEQ | I5H6- | 15H6 | QIQLVESGGGLVKPGG |
| ID NO: | HC 4 | heavy | SLRLSCAVSGFSINTG |
| 6132 | | chain | GYHWNWIRQAPGKGLE |
| | | variable | WVGYIYSSGTTRYNPS |
| | | region | LKSRFTISRDTAKNSF |
| | | humanized | YLQMNSLRAEDTAVYY |
| | | variant 4 | CARGNWHYFDYWGQGT |
| | | | LVTVSS |
| SEQ | 15H6- | 15H6 | QIQLVQSGAEVKKPGA |
| ID NO: | HC_5 | heavy | SVKVSCKVSGFSINTG |
| 6133 | | chain | GYHWNWVRQAPGQGLE |
| | | variable | WMGYIYSSGTTRYNPS |
| | | region | LKSRVTMTRDTSTNTF |
| | | humanized | YMELSSLRSEDTAVYY |
| | | variant 5 | CARGNWHYFDYWGQGT |
| | | | LVTVSS |
| SEQ | 15H6- | 15H6 | EIQLVQSGAEVKKPGA |
| ID NO: | HC_6 | heavy | TVKISCKVSGFSINTG |
| 6134 | | chain | GYHWNWVQQAPGKGLE |
| | | variable | WMGYIYSSGTTRYNPS |
| | | region | LKSRVTITRDTSTNTF |
| | | humanized | YMELSSLRSEDTAVYY |
| | | variant 6 | CARGNWHYFDYWGQGT |
| | | | LVTVSS |
| SEQ | 9G1-LC | 9G1 | SYTLTQPPLLSVALGH |
| ID NO: | | light | KATITCSGERLSDKYV |
| 7294 | | chain | HWYQQKPGRAPVMVIY |
| | | variable | ENDKRPSGIPDQFSGS |
| | | region | NSGNIATLTISKAQAG |
| | | | YEADYYCQSWDSTNSA |
| | | | VFGSGTQLTVL |
| SEQ | 15H6-LC | 15H6 | SYTLTQPPSLSVAPGQ |
| ID NO: | | light | KATIICSGENLSDKYV |
| 6136 | | chain | HWYQQKPGRAPVMVIY |
| | | variable | ENEKRPSGIPDQFSGS |
| | | region | NSGNIATLTISKAQPG |
| | | | SEADYYCHYWESINSV |
| | | | VFGSGTHLTVL |
| SEQ | 9G1-LC_1 | 9G1 | QSVTTQPPSVSGAPG |
| ID NO: | | light | QRVTISCSGERLSDK |
| 6137 | | chain | YVHWYQQLPGTAPKM |
| | | variable | LIYENDKRPSGVPDR |
| | | region | FSGSNSGNSASLAIT |
| | | humanized | GLQAEDEADYYCQSW |
| | | variant 1 | DSTNSAVFGGGTQLT |
| | | | VL |
| SEQ | 9G1-LC_2 | 9G1 | QSVTTQPPSASGTPG |
| ID NO: | | light | QRVTISCSGERLSDK |
| 6138 | | chain | YVHWYQQLPGTAPKM |
| | | variable | LIYENDKRPSGVPDR |
| | | region | FSGSNSGNSASLAIS |
| | | humanized | GLQSEDEADYYCQSW |
| | | variant 2 | DSTNSAVFGGGTQLT |
| | | | VL |
| SEQ | 9G1-LC_3 | 9G1 | QSVTTQPPSASGTPG |
| ID NO: | | light | QRVTISCSGERLSDK |
| 6139 | | chain | YVHWYQQLPGTAPKM |
| | | variable | LIYENDKRPSGVPDR |
| | | region | FSGSNSGNSASLAIS |
| | | humanized | GLRSEDEADYYCQSW |
| | | variant 3 | DSTNSAVFGGGTQLT |
| | | | VL |
| SEQ | 9G1-LC_4 | 9G1 | SSETTQPHSVSVATA |
| ID NO: | | light | QMARITCSGERLSDK |
| 6140 | | chain | YVHWYQQKPGQDPVM |
| | | variable | VIYENDKRPSGIPER |
| | | region | FSGSNPGNTATLTIS |
| | | humanized | RIEAGDEADYYCQSW |
| | | variant 4 | DSTNSAVFGGGTQLT |
| | | | VL |
| SEQ | 9G1-LC_5 | 9G1 | DIQMTQSPSTLSASV |
| ID NO: | | light | GDRVTITCSGERLSD |
| 6141 | | chain | KYVHWYQQKPGKAPK |
| | | variable | MLIYENDKRPSGVPS |
| | | region | RFSGSNSGNEATLTI |
| | | humanized | SSLQPDDFATYYCQS |
| | | variant 5 | WDSTNSAVFGQGTKV |
| | | | EIK |
| SEQ | 15H6- | 15H6 | QYVLTQPPSASGTPG |
| ID NO: | LC_1 | light | QRVTISCSGENLSDK |
| 6142 | | chain | YVHWYQQLPGTAPKM |
| | | variable | LIYENEKRPSGVPDR |
| | | region | FSGSNSGNSASLAIS |
| | | humanized | GLQSEDEADYYCHYW |
| | | variant 1 | ESINSVVFGEGTELT |
| | | | VL |
| SEQ | 15H6- | 15H6 | QYVLTQPPSASGTPG |
| ID NO: | LC_2 | light | QRVTISCSGENLSDK |
| 6143 | | chain | YVHWYQQLPGTAPKM |
| | | variable | LIYENEKRPSGVPDR |
| | | region | FSGSNSGNSASLAIS |
| | | humanized | GLRSEDEADYYCHYW |
| | | variant 2 | ESINSVVFGEGTELT |
| | | | VL |
| SEQ | I5H6- | 15H6 | SYELTQPPSVSVSPG |
| ID NO: | LC_3 | light | QTASITCSGENLSDK |
| 6144 | | chain | YVHWYQQKPGQSPVM |
| | | variable | VIYENEKRPSGIPER |
| | | region | FSGSNSGNTATLTIS |
| | | humanized | GTQAMDEADYYCHYW |
| | | variant 3 | ESINSVVFGEGTELT |
| | | | VL |
| SEQ | 15H6- | 15H6 | DYVLTQSPLSLPVTP |
| ID NO: | LC_4 | light | GEPASISCSGENLSD |
| 6145 | | chain | KYVHWYLQKPGQSPQ |
| | | variable | MLIYENEKRPSGVPD |
| | | region | RFSGSNSGNDATLKI |
| | | humanized | SRVEAEDVGVYYCHY |
| | | variant 4 | WESINSVVFGQGTKV |
| | | | EIK |
| SEQ | 15H6- | 15H6 | AYQLTQSPSSLSASV |
| ID NO: | LC_5 | light | GDRVTITCSGENLSD |
| 6146 | | chain | KYVHWYQQKPGKAPK |
| | | variable | MLIYENEKRPSGVPS |
| | | region | RFSGSNSGNDATLTI |
| | | humanized | SSLQPEDFATYYCHY |
| | | variant 5 | WESINSVVFGQGTKV |
| | | | EIK |
| SEQ | 15H6- | 15H6 | EYVLTQSPATLSVSP |
| ID NO: | LC_6 | light | GERATLSCSGENLSD |
| 6147 | | chain | KYVHWYQQKPGQAPR |
| | | variable | MLIYENEKRPSGIPA |
| | | region | RFSGSNSGNEATLTI |
| | | humanized | SSLQSEDFAVYYCHY |
| | | variant 6 | WESINSVVFGQGTKV |
| | | | EIK |
| SEQ | 9D9-HC | 9D9 | QIQLQESGPGLVKPS |
| ID NO: | | heavy | QSLSLSCSVTGFSIN |
| 7295 | | chain | TGGYHWNWIRQFPGK |
| | | variable | KVEWMGYIYSSGTTK |
| | | region | YNPSLKSRISITRDT |
| | | | SKNQFFLQLNSVTTE |
| | | | DTATYYCARGDWHYF |
| | | | DYWGQGTMVAVSS |
| SEQ | 9D9-LC | 9D9 | SYTLTQPPLVSVALG |
| ID NO: | | light | QKATIICSGENLSDK |
| 7296 | | chain | YVHWYQQKPGRAPVM |
| | | variable | VIYENDKRPSGIPDQ |
| | | region | FSGSNSGNIATLTIS |
| | | | KAQAGYEADYYCHCW |
| | | | DSTNSAVFGSGTHLT |
| | | | VL |
| SEQ | 3A12-HC | 3A12 | QIQLQESGPGLVKPS |
| ID NO: | | heavy | QSLSLTCSVTGFSIN |
| 7297 | | chain | TGGYHWNWIRQFPGK |
| | | variable | KLEWMGYIYSSGSTR |
| | | region | YNPSLKSRFSITRDT |
| | | | SKNQFFLQLNSVTTE |
| | | | DTATYYCTRGNWHYF |
| | | | DYWGQGTLVAVSS |
| SEQ | 3A12-LC | 3A12 | SYTLTQPPLVSVALG |
| ID NO: | | light | QKATIICSGENLSDK |
| 7296 | | chain | YVHWYQQKPGRAPVM |
| | | variable | VIYENDKRPSGIPDQ |
| | | region | FSGSNSGNIATLTIS |
| | | | KAQAGYEADYYCHCW |
| | | | DSTNSAVFGSGTHLT |
| | | | VL |
| SEQ | 12D10-HC | 12D10 | QIQLQESGPGLVKPS |
| ID NO: | | heavy | QSLSLTCSVTGFSIN |
| 6122 | | chain | TGGYHWNWIRQFPGK |
| | | variable | KLEWMGYIYSSGTTR |
| | | region | YNPSLKSRISITRDT |
| | | | SKNQFFLQLNSVTPE |
| | | | DTATYYCTRGNWHYF |
| | | | DYWGQGTLVAVSS |
| SEQ | 12D10-LC | 12D10 | SYTLTQPPSLSVAPG |
| ID NO: | | light | QKATIICSGENLSDK |
| 6136 | | chain | YVHWYQQKPGRAPVM |
| | | variable | VIYENEKRPSGIPDQ |
| | | region | FSGSNSGNIATLTIS |
| | | | KAQPGSEADYYCHYW |
| | | | ESINSVVFGSGTHLT |
| | | | VL |
| SEQ | 15E1-HC | 15E1 | QIQLQESGPGLVKPS |
| ID NO: | | heavy | QSLSLSCSVTGFSIT |
| 7298 | | chain | TTGYHWNWIRQFPGK |
| | | variable | KLEWMGYIYSSGSTS |
| | | region | YNPSLKSRFSITRDT |
| | | | SKNQFFLQLNSVTTE |
| | | | DTATYYCARGDWHYF |
| | | | DYWGPGTMVTVSS |
| SEQ | 15E1-LC | 15E1 | SFTLTQPPLVSVAVG |
| ID NO: | | light | QVATITCSGEKLSDK |
| 7299 | | chain | YVHWYQQKPGRAPVM |
| | | variable | VIYENDRRPSGIPDQ |
| | | region | FSGSNSGNIASLTIS |
| | | | KAQAGDEADYFCQFW |
| | | | DSTNSAVFGGGTQLT |
| | | | VL |
| SEQ | 15E1_Hum | 15E1 | QIQLQESGPGLVKPS |
| ID NO: | anized | heavy | QTLSLTCTVSGFSIT |
| 7300 | variant VH | chain | TTGYHWNWIRQHPGK |
| | 1 | variable | GLEWIGYIYSSGSTS |
| | | region | YNPSLKSLVTISRDT |
| | | humanized | SKNQFSLKLSSVTAA |
| | | variant 1 | DTAVYYCARGDWHYF |
| | | | DYWGQGTMVTVSS |
| SEQ | 15E1_ | 15E1 | QIQLVESGGGLVKPG |
| ID NO: | Humanized | heavy | GSLRLSCAVSGFSIT |
| 7301 | variant | chain | TTGYHWNWIRQAPGK |
| | VH 2 | variable | GLEWVGYIYSSGSTS |
| | | region | YNPSLKSRFTISRDT |
| | | humanized | AKNSFYLQMNSLRAE |
| | | variant 2 | DTAVYYCARGDWHYF |
| | | | DYWGQGTMVTVSS |
| SEQ | 15E1_Hum | 15E1 | EIQLLESGGGLVQPG |
| ID NO: | anized | heavy | GSLRLSCAVSGFSIT |
| 7302 | variant VH | chain | TTGYHWNWVRQAPGK |
| | 3 | variable | GLEWVGYIYSSGSTS |
| | (BJM0407 | region | YNPSLKSRFTISRDT |
| | VH and | humanized | SKNTFYLQMNSLRAE |
| | BJM0411 | variant 3 | DTAVYYCARGDWHYF |
| | VH) | | DYWGQGTMVTVSS |
| SEQ | 15E1_Hum | 15E1 | EIQLVESGGGLVQPG |
| ID NO: | anized | heavy | GSLRLSCAVSGFSIT |
| 7303 | variant VH | chain | TTGYHWNWVRQAPGK |
| | 4 | variable | GLEWVGYIYSSGSTS |
| | | region | YNPSLKSRFTISRDT |
| | | humanized | AKNSFYLQMNSLRAE |
| | | variant 4 | DTAVYYCARGDWHYF |
| | | | DYWGQGTMVTVSS |
| SEQ | 15E1_ | 15E1 | QIQLVQSGAEVKKPG |
| ID NO: | Humanized | heavy | ASVKVSCKVSGFSIT |
| 7304 | variant_ | chain | TTGYHWNWVRQAPGQ |
| | VH | variable | GLEWMGYIYSSGSTS |
| | 5 | region | YNPSLKSRVTM |
| | | humanized | TRDTSTNTFYMELSS |
| | | variant 5 | LRSEDTAVYYCARGD |
| | | | WHYFDYWGQGTMVTV |
| | | | SS |
| SEQ | 15E1_ | 15E1 | SSETTQPPSVSVSPG |
| ID NO: | Humanized | light | QTASITCSGEKLSDK |
| 7305 | variant_VL | chain | YVHWYQQKPGQSPVM |
| | 1 | variable | VIYENDRRPSGIPER |
| | (BJM0407 | region | FSGSNSGNTATLTIS |
| | VL) | humanized | GTQAMDEADYFCQFW |
| | | variant 1 | DSTNSAVFGGGTQLT |
| | | | VL |
| SEQ | 15E1_ | 15E1 | SSETTQPHSVSVATA |
| ID NO: | Humanized | light | QMARITCSGEKLSDK |
| 7306 | variant_VL | chain | YVHWYQQKPGQDPVM |
| | 2 | variable | VIYENDRRPSGIPER |
| | | region | FSGSNPGNTATLTIS |
| | | humanized | RIEAGDEADYFCQFW |
| | | variant 2 | DSTNSAVFGGGTQLT |
| | | | VL |
| SEQ | 15E1_ | 15E1 | QSVTTQPPSASGTPG |
| ID NO: | Humanized | light | QRVTISCSGEKLSDK |
| 7307 | variant_VL | chain | YVHWYQQLPGTAPKM |
| | 3 | variable | LIYENDRRPSGVPDR |
| | | region | FSGSNSGNSASLAIS |
| | | humanized | GLRSEDEADYFCQFW |
| | | variant 3 | DSTNSAVFGGGTQLT |
| | | | VL |
| SEQ | 15E1_ | 15E1 | QSVTTQPPSVSGAPG |
| ID NO: | Humanized | light | QRVTISCSGEKLSDK |
| 7308 | variant_VL | chain | YVHWYQQLPGTAPKM |
| | 4 | variable | LIYENDRRPSGVPDR |
| | | region | FSGSNSGNSASLAIT |
| | | humanized | GLQAEDEADYFCQFW |
| | | variant 4 | DSTNSAVFGGGTQLT |
| | | | VL |
| SEQ | 15E1_ | 15E1 | DSVTTQSPLSLPVTL |
| ID NO: | Humanized | light | GQPASISCSGEKLSD |
| 7309 | variant_VL | chain | KYVHWYQQRPGQSPR |
| | 5 | variable | ML1YENDRRPSGVPD |
| | (BJM0411 | region | RFSGSNSGNDATLKI |
| | VL) | humanized | SRVEAEDVGVYFCQF |
| | | variant 5 | WDSTNSAVFGGGTKV |
| | | | EIK |

TABLE 10
Exemplary NKp30-targeting
antigen binding domains/
antibody molecules

| SEQ | Ab | Descrip- | |
|---|---|---|---|
| ID NO | ID | tion | Sequence |
| SEQ | Ch(anti- | 9G1 | QIQLQESGPGLVKPS |
| ID NO: | NKp30 | Heavy | QSLSLTCSVTGFSIN |
| 6148 | 9G1)HC | chain | TGGYHWNWIRQFPGK |
| | N297A | | KLEWMGYIYSSGSTS |
| | | | YNPSLKSRISITRDT |
| | | | SKNQFFLQLNSVTTE |
| | | | DTATYYCARGNWHYF |
| | | | DFWGQGTMVTVSSAS |
| | | | TKGPSVFPLAPSSKS |
| | | | TSGGTAALGCLVKDY |
| | | | FPEPVTVSWNSGALT |
| | | | SGVHTFPAVLQSSGL |
| | | | YSLSSWTVPSSSLGT |
| | | | QTYICNVNHKPSNTK |
| | | | VDKRVEPKSCDKTHT |
| | | | CPPCPAPELLGGPSV |
| | | | FLFPPKPKDTLMISR |
| | | | TPEVTCVVVDVSHED |
| | | | PEVKFNWYVDGVEVH |
| | | | NAKTKPREEQYASTY |
| | | | RVVSVLTVLHQDWLN |
| | | | GKEYKCKVSNKALPA |
| | | | PIEKTISKAKGQPRE |
| | | | PQVCTLPPSREEMTK |
| | | | NQVSLSCAVKGFYPS |
| | | | DIAVEWESNGQPENN |
| | | | YKTTPPVLDSDGSFF |
| | | | LVSKLTVDKSRWQQG |
| | | | NVFSCSVMHEALHNH |
| | | | YTQKSLSLSPGK |
| SEQ | Ch(anti- | 9G1 | QIQLQESGPGLVKPS |
| ID NO: | NKp30 | heavy | QSLSLTCSVTGFSIN |
| 6149 | 9G1)HC | chain | TGGYHWNWIRQFPGK |
| | | | KLEWMGYIYSSGSTS |
| | | | YNPSLKSRISITRDT |
| | | | SKNQFFLQLNSVTTE |
| | | | DTATYYCARGNWHYF |
| | | | DFWGQGTMVTVSSAS |
| | | | TKGPSVFPLAPSSKS |
| | | | TSGGTAALGCLVKDY |
| | | | FPEPVTVSWNSGALT |
| | | | SGVHTFPAVLQSSGL |
| | | | YSLSSVVTVPSSSLG |
| | | | TQTYICNVNHKPSNT |
| | | | KVDKRVEPK |
| | | | SCDKTHTCPPCPAPE |
| | | | LLGGPSVFLFPPKPK |
| | | | DTLMISRTPEVTCVV |
| | | | VDVSHEDPEVKFNWY |
| | | | VDGVEVHNAKTKPRE |
| | | | EQYNSTYRVVSVLTV |
| | | | LHQDWLNGKEYKCKV |
| | | | SNKALPAPIEKTISK |
| | | | AKGQPREPQVCTLPP |
| | | | SREEMTKNQVSLSCA |
| | | | VKGFYPSDIAVEWES |
| | | | NGQPENNYKTTPPVL |
| | | | DSDGSFFLVSKLTVD |
| | | | KSRWQQGNVFSCSVM |
| | | | HEALHNHYTQKSLSL |
| | | | SPGK |
| SEQ | Ch(anti- | 9G1 | SYTLTQPPLLSVALGH |
| ID NO: | NKp30 | Light | KATITCSGERLSDKYV |
| 6150 | 9G1 )LC | chain | HWYQQKPGRAPVMVIY |
| | | | ENDKRPSGIPDQFSGS |
| | | | NSGNIATLTISKAQAG |
| | | | YEADYYCQSWDSTNSA |
| | | | VFGSGTQLTVLGQPKA |
| | | | NPTVTLFPPSSEELQA |
| | | | NKATLVCLISDFYPGA |
| | | | VTVAWKADGSPVKAGV |
| | | | ETTKPSKQSNNKYAAS |
| | | | SYLSLTPEQWKSHRSY |
| | | | SCQVTHEGSTVEKTVA |
| | | | PTECS |
| SEQ | Ch(anti- | 15H6 | QIQLQESGPGLVKPSQ |
| ID NO: | NKp30 | heavy | SLSLTCSVTGFSINTG |
| 6151 | 15H6)HC | chain | GYHWNWIRQFPGKKLE |
| | N297A | | WMGYIYSSGTTRYNPS |
| | | | LKSRISITRDTSKNQF |
| | | | FLQLNSVTPEDTATYY |
| | | | CTRGNWHYFDYWGQGT |
| | | | LVAVSSASTKGPSVFP |
| | | | LAPSSKSTSGGTAALG |
| | | | CLVKDYFPEPVTVSWN |
| | | | SGALTSGVHTFPAVLQ |
| | | | SSGLYSLSSVVTVPSS |
| | | | SLGTQTYICNVNHKPS |
| | | | NTKVDKRVEPKSCDKT |
| | | | HTCPPCPAPELLGGPS |
| | | | VFLFPPKPKDTLMISR |
| | | | TPEVTCVVVDVSHEDP |
| | | | EVKFNWYVDGVEVHNA |
| | | | KTKPREEQYASTYRVV |
| | | | SVLTVLHQDWLNGKEY |
| | | | KCKVSNKALPAPIEKT |
| | | | ISKAKGQPREPQVCTL |
| | | | PPSREEMTKNQVSLSC |
| | | | AVKGFYPSDIAVEWES |
| | | | NGQPENNYKTTPPVLD |
| | | | SDGSFFLVSKLTVDKS |
| | | | RWQQGNVFSCSVMHEA |
| | | | LHNHYTQKSLSLSPGK |
| SEQ | Ch(anti- | 15H6 | QIQLQESGPGLVKPSQ |
| ID NO: | NKp30 | heavy | SLSLTCSVTGFSINTG |
| 6152 | 15H6)HC | chain | GYHWNWIRQFPGKKLE |
| | (hole) | | WMGYIYSSGTTRYNPS |
| | | | LKSRISITRDTSKNQF |
| | | | FLQLNSVTPEDTATYY |
| | | | CTRGNWHYFDYWGQGT |
| | | | LVAVSSASTKGPSVFP |
| | | | LAPSSKSTSGGTAALG |
| | | | CLVKDYFPEPVTVSWN |
| | | | SGALTSGVHTFPAVLQ |
| | | | SSGLYSLSSWTVPSSS |
| | | | LGTQTYICNVNHKPSN |
| | | | TKVDKRVEPKSCDKTH |
| | | | TCPPCPAPELLGGPSV |
| | | | FLFPPKPKDTLMISRT |
| | | | PEVTCVVVDVSHEDPE |
| | | | VKFNWYVDGVEVHNAK |
| | | | TKPREEQYNSTYRVVS |
| | | | VLTVLHQDWLNGKEYK |
| | | | CKVSNKALPAPIEKTI |
| | | | SKAKGQPREPQVCTLP |
| | | | PSREEMTKNQVSLSCA |
| | | | VKGFYPSDIAVEWESN |
| | | | GQPENNYKTTPPVLDS |
| | | | DGSFFLVSKLTVDKSR |
| | | | WQQGNVFSCSVMHEAL |
| | | | HNHYTQKSLSLSPGK |
| SEQ | Ch(anti- | 15H6 | SYTLTQPPSLSVAPG |
| ID NO: | NKp30 | Light | QKATIICSGENLSDK |
| 6153 | 15H6)LC | chain | YVHWYQQKPGRAPVM |
| | | | VIYENEKRPSGIPDQ |
| | | | FSGSNSGNIATLTIS |
| | | | KAQPGSEADYYCHYW |
| | | | ESINSVVFGSGTHLT |
| | | | VLGQPKANPTVTLFP |
| | | | PSSEELQANKATLVC |
| | | | LISDFYPGAVTVAWK |
| | | | ADGSPVKAGVETTKP |
| | | | SKQSNNKYAASSYLS |
| | | | LTPEQWKSHRSYSCQ |
| | | | VTHEGSTVEKTVAPT |
| | | | ECS |
| SEQ | BJM0859 | | EIQLLESGGGLVQPG |
| ID NO: | lambda | | GSLRLSCAVSGFSIT |
| 7310 | scFv | | TTGYHWNWVRQAPGK |
| | | | GLEWVGYIYSSGSTS |
| | | | YNPSLKSRFTISRDT |
| | | | SKNTFYLQMNSLRAE |
| | | | DTAVYYCARGDWHYF |
| | | | DYWGQGTMVTVSSGG |
| | | | GGSGGGGSGGGGSGG |
| | | | GGSSSETTQPPSVSV |
| | | | SPGQTASITCSGEKL |
| | | | SDKYVHWYQQKPGQS |
| | | | PVMVIYENDRRPSGI |
| | | | PERFSGSNSGNTATL |
| | | | TISGTQAMDEADYFC |
| | | | QFWDSTNSAVFGGGT |
| | | | QLTVL |
| SEQ | BJM0860 | | EIQLLESGGGLVQPG |
| ID NO: | kappa | | GSLRLSCAVSGFSIT |
| 7311 | scFv | | TTGYHWNWVRQAPGK |
| | | | GLEWVGYIYSSGSTS |
| | | | YNPSLKSRFT1SRDT |
| | | | SKNTFYLQMNSLRAE |
| | | | DTAVYYCARGDWHYF |
| | | | DYWGQGTMVTVSSGG |
| | | | GGSGGGGSGGGGSGG |
| | | | GGSDSVTTQSPLSLP |
| | | | VTLGQPASISCSGEK |
| | | | LSDKYVHWYQQRPGQ |
| | | | SPRML1YENDRRPSG |
| | | | VPDRFSGSNSGNDAT |
| | | | LKISRVEAEDVGVYF |
| | | | CQFWDSTNSAVFGGG |
| | | | TKVEIK |

[0863] In some embodiments, the NK cell engager is an antigen binding domain that binds to NKp46 (e.g., NKp46 present, e.g., expressed or displayed, on the surface of an NK cell) and comprises any CDR amino acid sequence, framework region (FWR) amino acid sequence, or variable region amino acid sequence disclosed in Table 15. In some embodiments, binding of the NK cell engager, e.g., antigen binding domain that binds to NKp46, to the NK cell activates the NK cell. An antigen binding domain that binds to NKp46 (e.g., NKp46 present, e.g., expressed or displayed, on the surface of an NK cell) may be said to target NKp46, the NK cell, or both.

[0864] In some embodiments, the NK cell engager is an antigen binding domain that binds to NKG2D (e.g., NKG2D present, e.g., expressed or displayed, on the surface of an NK cell) and comprises any CDR amino acid sequence, framework region (FWR) amino acid sequence, or variable region amino acid sequence disclosed in Table 15. In some embodiments, binding of the NK cell engager, e.g., antigen binding domain that binds to NKG2D, to the NK cell activates the NK cell. An antigen binding domain that binds to NKG2D (e.g., NKG2D present, e.g., expressed or displayed, on the surface of an NK cell) may be said to target NKG2D, the NK cell, or both.

[0865] In some embodiments, the NK cell engager is an antigen binding domain that binds to CD16 (e.g., CD16 present, e.g., expressed or displayed, on the surface of an NK cell) and comprises any CDR amino acid sequence, framework region (FWR) amino acid sequence, or variable region amino acid sequence disclosed in Table 15. In some embodiments, binding of the NK cell engager, e.g., antigen binding domain that binds to CD16, to the NK cell activates the NK cell. An antigen binding domain that binds to CD16 (e.g., CD16 present, e.g., expressed or displayed, on the surface of an NK cell) may be said to target CD16, the NK cell, or both.

TABLE 15
Exemplary variable regions of NKp46,
NKG2D, or CD16-targeting antigen
binding domains

| SEQ ID | | Descrip- | |
|---|---|---|---|
| NO | Ab ID | tion | Sequence |
| SEQ ID | NKG2D_ | scFv that | QVHLQESGPGLVKPS |
| NO: 6175 | 1scFv | binds | ETLSLTCTVSDDSIS |
| | | NKG2D | SYYWSWIRQPPGKGL |
| | | | EWIGHISYSGSANYN |
| | | | PSLKSRVTISVDTSK |
| | | | NQFSLKLSSVTAADT |
| | | | AVYYCANWDDAFNIW |
| | | | GQGTMVTVSSGGGGS |
| | | | GGGGSGGGGSGGGGS |
| | | | EIVLTQSPGTLSLSP |
| | | | GERATLSCRASQSVS |
| | | | SSYLAWYQQKPGQAP |
| | | | RLLIYGASSRATGIP |
| | | | DRFSGSGSGTDFTLT |
| | | | ISRLEPEDFAVYYCQ |
| | | | QYGSSPWTFGQGTKV |
| | | | EIK |
| SEQ ID | NKG2D | VH that | QVHLQESGPGLVKPS |
| NO: 6176 | 1VH | binds | ETLSLTCTVSDDSIS |
| | | NKG2D | SYYWSWIRQPPGKGL |
| | | | EWIGHISYSGSANYN |
| | | | PSLKSRVTISVDTSK |
| | | | NQFSLKLSSVTAADT |
| | | | AVYYCANWDDAFNIW |
| | | | GQGTMVTVSS |
| SEQ ID | NKG2D | VL that | EIVLTQSPGTLSLSP |
| NO: 6177 | 1VL | binds | GERATLSCRASQSVS |
| | | NKG2D | SSYLAWYQQKPGQAP |
| | | | RLLIYGASSRATGIP |
| | | | DRFSGSGSGTDFTLT |
| | | | ISRLEPEDFAVYYCQ |
| | | | QYGSSPWTFGQGTKV |
| | | | EIK |
| SEQ ID | NKG2D_ | scFv that | EVQLVQSGAEVKEPG |
| NO: 6178 | 2scFv | binds | ESLKISCKNSGYSFT |
| | | NKG2D | NYWVGWVRQMPGKGL |
| | | | EWMGIIYPGDSDTRY |
| | | | SPSFQGQVTISADKS |
| | | | INTAYLQWSSLKASD |
| | | | TAMYYCGRLTMFRGI |
| | | | IIGYFDYWGQGTLVT |
| | | | VSSGGGGSGGGGSGG |
| | | | GGSGGGGSEIVLTQS |
| | | | PATLSLSPGERATLS |
| | | | CRASQSVSSYLAWYQ |
| | | | QKPGQAPRLLIYDAS |
| | | | NRATGIPARFSGSGS |
| | | | GTDFTLTISSLEPED |
| | | | FAVYYCQQRSNWPWT |
| | | | FGQGTKVEIK |
| SEQ ID | NKG2D | VH that | EVQLVQSGAEVKEPG |
| NO: 6179 | 2VH | binds | ESLKISCKNSGYSFT |
| | | NKG2D | NYWVGWVRQMPGKGL |
| | | | EWMGIIYPGDSDTRY |
| | | | SPSFQGQVTISADKS |
| | | | INTAYLQWSSLKASD |
| | | | TAMYYCGRLTMFRGI |
| | | | IIGYFDYWGQGTLVT |
| | | | VSS |
| SEQ ID | NKG2D | VL that | EIVLTQSPATLSLSP |
| NO: 6180 | 2VL | binds | GERATLSCRASQSVS |
| | | NKG2D | SYLAWYQQKPGQAPR |
| | | | LLIYDASNRATGIPA |
| | | | RFSGSGSGTDFTLTI |
| | | | SSLEPEDFAVYYCQQ |
| | | | RSNWPWTFGQGTKVE |
| | | | IK |
| SEQ ID | NKp46scF | scFv | QVQLQQSGPELVKPG |
| NO: 6181 | V | that | ASVKMSCKASGYTFT |
| | | binds | DYVINWGKQRSGQGL |
| | | NKp46 | EWIGEIYPGSGTNYY |
| | | | NEKFKAKATLTADKS |
| | | | SNIAYMQLSSLTSED |
| | | | SAVYFCARRGRYGLY |
| | | | AMDYWGQGTSVTVSS |
| | | | GGGGSGGGGSGGGGS |
| | | | GGGGSDIQMTQTTSS |
| | | | LSASLGDRVTISCRA |
| | | | SQDISNYLNWYQQKP |
| | | | DGTVKLLIYYTSRLH |
| | | | SGVPSRFSGSGSGTD |
| | | | YSLTINNLEQEDIAT |
| | | | YFCQQGNTRPWTFGG |
| | | | GTKLEIK |
| SEQ ID | NKp46V | VH that | QVQLQQSGPELVKPG |
| NO: 6182 | H | binds | ASVKMSCKASGYTFT |
| | | NKp46 | DYVINWGKQRSGQGL |
| | | | EWIGEIYPGSGTNYY |
| | | | NEKFKAKATLTADKS |
| | | | SNIAYMQLSSLTSED |
| | | | SAVYFCARRGRYGLY |
| | | | AMDYWGQGTSVTVSS |
| SEQ ID | NKp46VL | VL that | DIQMTQTTSSLSASL |
| NO: 6183 | | binds | GDRVTISCRASQDIS |
| | | NKp46 | NYLNWYQQKPDGTVK |
| | | | LLIYYTSRLHSGVPS |
| | | | RFSGSGSGTDYSLTI |
| | | | NNLEQEDIATYFCQQ |
| | | | GNTRPWTFGGGTKLE |
| | | | IK |
| SEQ ID | CD16scFv | scFv | EVQLVESGG |
| NO: 6184 | | that | GVVRPGGSLR |
| | | binds | LSCAASGFTF |
| | | CD16 | DDYGMSWVRQ |
| | | | APGKGLEWVS |
| | | | GINWNGGSTG |
| | | | YADSVKGRFT |
| | | | ISRDNAKNSL |
| | | | YLQMNSLRAE |
| | | | DTAVYYCARG |
| | | | RSLLFDYWGQ |
| | | | GTLVTVSRGG |
| | | | GGSGGGGSGG |
| | | | GGSSELTQDP |
| | | | AVSVALGQTV |
| | | | RITCQGDSLR |
| | | | SYYASWYQQK |
| | | | PGQAPVLVIY |
| | | | GKNNRPSGIP |
| | | | DRFSGSSSGN |
| | | | TASLT1TGAQ |
| | | | AEDEADYYCN |
| | | | SRDSSGNHVV |
| | | | FGGGTKLTVL |
| SEQ ID | CD16VH | VH that | EVQLVESGG |
| NO: 6185 | | binds | GVVRPGGSLR |
| | | CD16 | LSCAASGFTF |
| | | | DDYGMSWVRQ |
| | | | APGKGLEWVS |
| | | | GINWNGGSTG |
| | | | YADSVKGRFT |
| | | | ISRDNAKNSL |
| | | | YLQMNSLRAE |
| | | | DTAVYYCARG |
| | | | RSLLFDYWGQ |
| | | | GTLVTVSR |
| SEQ ID | CD16VL | VL that | SSELTQDP |
| NO: 6186 | | binds | AVSVALGQTV |
| | | CD16 | RITCQGDSLR |
| | | | SYYASWYQQK |
| | | | PGQAPVLVIY |
| | | | GKNNRPSGIP |
| | | | DRFSGSSSGNT |
| | | | ASLTITGAQ |
| | | | AEDEADYYCN |
| | | | SRDSSGNHVV |
| | | | FGGGTKLTVL |

[0866] In one embodiment, the NK cell engager is a ligand of NKp30, e.g., is a B7-6, e.g., comprises the amino acid sequence of: DLKVEMMAGGTQITPLNDNVTIFCNIFYSQPLNITSMGITWFWKSLTFDKEVKVFEFFGD HQEAFRPGAIVSPWRLKSGDASLRLPGIQLEEAGEYRCEVVVTPLKAQGTVQLEVVASP ASRLLLDQVGMKENEDKYMCES SGFYPEAINITWEKQTQKFPHPIEISEDVITGPTIKNM DGTFNVTSCLKLNSSQEDPGTVYQCVVRHASLHTPLRSNFTLTAARHSLSETEKTDNFS (SEQ ID NO: 7233), a fragment thereof, or an amino acid sequence substantially identical thereto (e.g., 95% to 99.9% identical thereto, or having at least one amino acid alteration, but not more than five, ten or fifteen alterations (e.g., substitutions, deletions, or insertions, e.g., conservative substitutions) to the amino acid sequence of SEQ ID NO: 7233.

[0867] In other embodiments, the NK cell engager is a ligand of NKp44 or NKp46, which is a viral HA. Viral hemagglutinins (HA) are glyco proteins which are on the surface of viruses. HA proteins allow viruses to bind to the membrane of cells via sialic acid sugar moieties which contributes to the fusion of viral membranes with the cell membranes (see e.g., Eur J Immunol. 2001 September; 31(9):2680-9 “Recognition of viral hemagglutinins by NKp44 but not by NKp30”; and Nature. 2001 Feb. 22; 409(6823):1055-60 “Recognition of haemagglutinins on virus-infected cells by NKp46 activates lysis by human NK cells” the contents of each of which are incorporated by reference herein).

[0868] In other embodiments, the NK cell engager is a ligand of NKG2D chosen from MICA, MICB, or ULBP1, e.g., wherein:

(i) MICA comprises the amino acid sequence: EPHSLRYNLTVLSWDGSVQSGFLTEVHLDGQPFLRCDRQKCRAKPQGQWAEDVLGNK TWDRETRDLTGNGKDLRMTLAHIKDQKEGLHSLQEIRVCEIHEDNSTRSSQHFYYDGEL FLSQNLETKEWTPQSSRAQTLAMNVRNFLKEDAMKTKTHYHAMHADCLQELRRYLK SGVVLRRTVPPMVNVTRSEASEGNITVTCRASGFYPWNITLSWRQDGVSLSHDTQQWG DVLPDGNGTYQTWVATRICQGEEQRFTCYMEHSGNHSTHPVPSGKVLVLQSHW (SEQ ID NO: 7234), a fragment thereof, or an amino acid sequence substantially identical thereto (e.g., 95% to 99.9% identical thereto, or having at least one amino acid alteration, but not more than five, ten or fifteen alterations (e.g., substitutions, deletions, or insertions, e.g., conservative substitutions) to the amino acid sequence of SEQ ID NO: 7234;
(ii) MICB comprises the amino acid sequence: AEPHSLRYNLMVLSQDESVQSGFLAEGHLDGQPFLRYDRQKRRAKPQGQWAEDVLGA KTWDTETEDLTENGQDLRRTLTHIKDQKGGLHSLQEIRVCEIHEDSSTRGSRHFYYDGEL FLSQNLETQESTVPQS SRAQTLAMNVTNFWKEDAMKTKTHYRAMQADCLQKLQRYLK SGVAIRRTVPPMVNVTCSEVSEGNITVTCRASSFYPRNITLTWRQDGVSLSHNTQQWGD VLPDGNGTYQTWVATRIRQGEEQRFTCYMEHSGNHGTHPVPSGKVLVLQSQRTD (SEQ ID NO: 7235), a fragment thereof, or an amino acid sequence substantially identical thereto (e.g., 95% to 99.9% identical thereto, or having at least one amino acid alteration, but not more than five, ten or fifteen alterations (e.g., substitutions, deletions, or insertions, e.g., conservative substitutions) to the amino acid sequence of SEQ ID NO: 7235; or
(iii) ULBP1 comprises the amino acid sequence: GWVDTHCLCYDFIITPKSRPEPQWCEVQGLVDERPFLHYDCVNHKAKAFASLGKKVNV TKTWEEQTETLRDVVDFLKGQLLDIQVENLIPIEPLTLQARMSCEHEAHGHGRGSWQFL FNGQKFLLFDSNNRKWTALHPGAKKMTEKWEKNRDVTMFFQKISLGDCKMWLEEFL MYWEQMLDPTKPPSLAPG (SEQ ID NO: 7236), a fragment thereof, or an amino acid sequence substantially identical thereto (e.g., 95% to 99.9% identical thereto, or having at least one amino acid alteration, but not more than five, ten or fifteen alterations (e.g., substitutions, deletions, or insertions, e.g., conservative substitutions) to the amino acid sequence of SEQ ID NO: 7236.

[0869] In other embodiments, the NK cell engager is a ligand of DNAM1 chosen from NECTIN2 or NECL5, e.g., wherein:

(i) NECTIN2 comprises the amino acid sequence: QDVRVQVLPEVRGQLGGTVELPCHLLPPVPGLYISLVTWQRPDAPANHQNVAAFHPKM GPSFPSPKPGSERLSFVSAKQSTGQDTEAELQDATLALHGLTVEDEGNYTCEFATFPKGS VRGMTWLRVIAKPKNQAEAQKVTFSQDPTTVALCISKEGRPPARISWLSSLDWEAKETQ VSGTLAGTVTVTSRFTLVPSGRADGVTVTCKVEHESFEEPALIPVTLSVRYPPEVSISGYD DNWYLGRTDATLSCDVRSNPEPTGYDWSTTSGTFPTSAVAQGSQLVIHAVDSLFNTTFV CTVTNAVGMGRAEQVIFVRETPNTAGAGATGG (SEQ ID NO: 7237), a fragment thereof, or an amino acid sequence substantially identical thereto (e.g., 95% to 99.9% identical thereto, or having at least one amino acid alteration, but not more than five, ten or fifteen alterations (e.g., substitutions, deletions, or insertions, e.g., conservative substitutions) to the amino acid sequence of SEQ ID NO: 7237; or
(ii) NECL5 comprises the amino acid sequence: WPPPGTGDVVVQAPTQVPGFLGDSVTLPCYLQVPNMEVTHVSQLTWARHGESGSMAV FHQTQGPSYSESKRLEFVAARLGAELRNASLRMFGLRVEDEGNYTCLFVTFPQGSRSVD IWLRVLAKPQNTAEVQKVQLTGEPVPMARCVSTGGRPPAQITWHSDLGGMPNTSQVPG FLSGTVTVTSLWILVPSSQVDGKNVTCKVEHESFEKPQLLTVNLTVYYPPEVSISGYDNN WYLGQNEATLTCDARSNPEPTGYNWSTTMGPLPPFAVAQGAQLLIRPVDKPINTTLICN VTNALGARQAELTVQVKEGPPSEHSGISRN (SEQ ID NO: 7238), a fragment thereof, or an amino acid sequence substantially identical thereto (e.g., 95% to 99.9% identical thereto, or having at least one amino acid alteration, but not more than five, ten or fifteen alterations (e.g., substitutions, deletions, or insertions, e.g., conservative substitutions) to the amino acid sequence of SEQ ID NO: 7238.

[0870] In yet other embodiments, the NK cell engager is a ligand of DAP10, which is an adapter for NKG2D (see e.g., Proc Natl Acad Sci USA. 2005 May 24; 102(21): 7641-7646; and Blood, 15 Sep. 2011 Volume 118, Number 11, the full contents of each of which is incorporated by reference herein).

[0871] In other embodiments, the NK cell engager is a ligand of CD16, which is a CD16a/b ligand, e.g., a CD16a/b ligand further comprising an antibody Fc region (see e.g., Front Immunol. 2013; 4: 76 discusses how antibodies use the Fc to trigger NK cells through CD16,the full contents of which are incorporated herein).

[0872] In other embodiments, the NK cell engager is a ligand of CRTAM, which is NECL2, e.g., wherein NECL2 comprises the amino acid sequence: QNLFTKDVTVIEGEVATISCQVNKSDDSVIQLLNPNRQTIYFRDFRPLKDSRFQLLNFSSS ELKVSLTNVSISDEGRYFCQLYTDPPQESYTTITVLVPPRNLMIDIQKDTAVEGEEIEVNC TAMASKPATTIRWFKGNTELKGKSEVEEWSDMYTVTSQLMLKVHKEDDGVPVICQVE HPAVTGNLQTQRYLEVQYKPQVHIQMTYPLQGLTREGDALELTCEAIGKPQPVMVTWV RVDDEMPQHAVLSGPNLFINNLNKTDNGTYRCEASNIVGKAHSDYMLYVYDPPTTIPPP TTTTTTTTTTTTTILTIITDSRAGEEGSIRAVDH (SEQ ID NO: 7239), a fragment thereof, or an amino acid sequence substantially identical thereto (e.g., 95% to 99.9% identical thereto, or having at least one amino acid alteration, but not more than five, ten or fifteen alterations (e.g., substitutions, deletions, or insertions, e.g., conservative substitutions) to the amino acid sequence of SEQ ID NO: 7239.

[0873] In other embodiments, the NK cell engager is a ligand of CD27, which is CD70, e.g., wherein CD70 comprises the amino acid sequence: QRFAQAQQQLPLESLGWDVAELQLNHTGPQQDPRLYWQGGPALGRSFLHGPELDKGQ LRIHRDGIYMVHIQVTLAICSSTTASRHHPTTLAVGICSPASRSISLLRLSFHQGCTIASQR LTPLARGDTLCTNLTGTLLPSRNTDETFFGVQWVRP (SEQ ID NO: 7240), a fragment thereof, or an amino acid sequence substantially identical thereto (e.g., 95% to 99.9% identical thereto, or having at least one amino acid alteration, but not more than five, ten or fifteen alterations (e.g., substitutions, deletions, or insertions, e.g., conservative substitutions) to the amino acid sequence of SEQ ID NO: 7240.

[0874] In other embodiments, the NK cell engager is a ligand of PSGL1, which is L-selectin (CD62L), e.g., wherein L-selectin comprises the amino acid sequence: WTYHYSEKPMNWQRARRFCRDNYTDLVAIQNKAEIEYLEKTLPFSRSYYWIGIRKIGGI WTWVGTNKSLTEEAENWGDGEPNNKKNKEDCVEIYIKRNKDAGKWNDDACHKLKAA LCYTASCQPWSCSGHGECVEIINNYTCNCDVGYYGPQCQFVIQCEPLEAPELGTMDCTH PLGNFSFSSQCAFSCSEGTNLTGIEETTCGPFGNWSSPEPTCQVIQCEPLSAPDLGIMNCSH PLASFSFTSACTFICSEGTELIGKKKTICESSGIWSNPSPICQKLDKSFSMIKEGDYN (SEQ ID NO: 7241), a fragment thereof, or an amino acid sequence substantially identical thereto (e.g., 95% to 99.9% identical thereto, or having at least one amino acid alteration, but not more than five, ten or fifteen alterations (e.g., substitutions, deletions, or insertions, e.g., conservative substitutions) to the amino acid sequence of SEQ ID NO: 7241.

[0875] In other embodiments, the NK cell engager is a ligand of CD96, which is NECL5, e.g., wherein NECL5 comprises the amino acid sequence: WPPPGTGDVVVQAPTQVPGFLGDSVTLPCYLQVPNMEVTHVSQLTWARHGESGSMAV FHQTQGPSYSESKRLEFVAARLGAELRNASLRMFGLRVEDEGNYTCLFVTFPQGSRSVD IWLRVLAKPQNTAEVQKVQLTGEPVPMARCVSTGGRPPAQITWHSDLGGMPNTSQVPG FLSGTVTVTSLWILVPSSQVDGKNVTCKVEHESFEKPQLLTVNLTVYYPPEVSISGYDNN WYLGQNEATLTCDARSNPEPTGYNWSTTMGPLPPFAVAQGAQLLIRPVDKPINTTLICN VTNALGARQAELTVQVKEGPPSEHSGISRN (SEQ ID NO: 7238), a fragment thereof, or an amino acid sequence substantially identical thereto (e.g., 95% to 99.9% identical thereto, or having at least one amino acid alteration, but not more than five, ten or fifteen alterations (e.g., substitutions, deletions, or insertions, e.g., conservative substitutions) to the amino acid sequence of SEQ ID NO: 7239.

[0876] In other embodiments, the NK cell engager is a ligand of CD100 (SEMA4D), which is CD72, e.g., wherein CD72 comprises the amino acid sequence: RYLQVSQQLQQTNRVLEVTNSSLRQQLRLKITQLGQSAEDLQGSRRELAQSQEALQVEQ RAHQAAEGQLQACQADRQKTKETLQSEEQQRRALEQKLSNMENRLKPFFTCGSADTCC PSGWIMHQKSCFYISLTSKNWQESQKQCETLSSKLATFSEIYPQSHSYYFLNSLLPNGGS GNSYWTGLSSNKDWKLTDDTQRTRTYAQSSKCNKVHKTWSWWTLESESCRSSLPYICE MTAFRFPD (SEQ ID NO: 7242), a fragment thereof, or an amino acid sequence substantially identical thereto (e.g., 95% to 99.9% identical thereto, or having at least one amino acid alteration, but not more than five, ten or fifteen alterations (e.g., substitutions, deletions, or insertions, e.g., conservative substitutions) to the amino acid sequence of SEQ ID NO: 7242.

[0877] In other embodiments, the NK cell engager is a ligand of NKp80, which is CLEC2B (AICL), e.g., wherein CLEC2B (AICL) comprises the amino acid sequence: KLTRDSQSLCPYDWIGFQNKCYYF SKEEGDWNSSKYNCSTQHADLTIIDNIEEMNFLRR YKCSSDHWIGLKMAKNRTGQWVDGATFTKSFGMRGSEGCAYLSDDGAATARCYTER KWICRKRIH (SEQ ID NO: 7243), a fragment thereof, or an amino acid sequence substantially identical thereto (e.g., 95% to 99.9% identical thereto, or having at least one amino acid alteration, but not more than five, ten or fifteen alterations (e.g., substitutions, deletions, or insertions, e.g., conservative substitutions) to the amino acid sequence of SEQ ID NO: 7243.

[0878] In other embodiments, the NK cell engager is a ligand of CD244, which is CD48, e.g., wherein CD48 comprises the amino acid sequence: QGHLVHMTVVSGSNVTLNISESLPENYKQLTWFYTFDQKIVEWDSRKSKYFESKFKGR VRLDPQSGALYISKVQKEDNSTYIMIRVLKKTGNEQEWKIKLQVLDPVPKPVIKIEKIEDM DDNCYLKLSCVIPGESVNYTWYGDKRPFPKELQNSVLETTLMPHNYSRCYTCQVSNSVS SKNGTVCLSPPCTLARS (SEQ ID NO: 7244), a fragment thereof, or an amino acid sequence substantially identical thereto (e.g., 95% to 99.9% identical thereto, or having at least one amino acid alteration, but not more than five, ten or fifteen alterations (e.g., substitutions, deletions, or insertions, e.g., conservative substitutions) to the amino acid sequence of SEQ ID NO: 7244.

[0879] In some embodiments, the NK cell engager is a viral hemagglutinin (HA), HA is a glycoprotein found on the surface of influenza viruses. It is responsible for binding the virus to cells with sialic acid on the membranes, such as cells in the upper respiratory tract or erythrocytes. HA has at least 18 different antigens. These subtypes are named H1 through H18. NCRs can recognize viral proteins. NKp46 has been shown to be able to interact with the HA of influenza and the HA-NA of Paramyxovirus, including Sendai virus and Newcastle disease virus. Besides NKp46, NKp44 can also functionally interact with HA of different influenza subtypes.

[0880] Death Receptor Signal Engagers

[0881] Death receptors, e.g., death receptors 4 and 5 (DR4 and DR5, also known as TRAIL-R1 and TRAIL-R2 respectively), are trimeric type I transmembrane proteins widely expressed in normal human tissues. Activation of death receptors causes intracellular signaling that induces cell death. TNF-related apoptosis-inducing ligand (TRAIL) (also known as Apo2L) is a trimeric protein that binds to Death receptors, activating their cell death-inducing signaling (Amarante-Mendes and Griffith. Pharmacol Ther. 2015 November; 155:117-31).

[0882] The present disclosure provides, inter alia, multispecific (e.g., bi-, tri-, quad-specific) or multifunctional molecules, that are engineered to contain one or more death receptor signal engagers that mediate binding to death receptors and/or activation of death receptor signaling on a target cell (e.g., the T cell comprising a TCRBV antigen (e.g., a TCRBV antigen corresponding to a biased TCRBV clonotype). Accordingly, in some embodiments, the death receptor signal engager comprises one or more TRAIL polypeptides or a fragment thereof (TRAIL molecule), one or more death receptors or a fragment thereof (death receptor molecule), or one or more antigen binding domains that specifically binds to a death receptor (e.g., and activates death receptor signaling). Without wishing to be bound by theory, it is thought that a death receptor signal engager that can activate death receptor signaling on a target cell can induce the death of the target cell, e.g., a target disease cell (e.g., a T cell comprising a TCRBV antigen (e.g., a TCRBV antigen corresponding to a biased TCRBV clonotype).

[0883] Death receptor signal engagers may comprise TRAIL molecules and/or death receptor molecules from or derived from versions of TRAIL and death receptors known to those skilled in the art. In some embodiments, the death receptor signal engager comprises a human TRAIL molecule or death receptor molecule. In some embodiments, the death receptor signal engager comprises a mouse TRAIL molecule or death receptor molecule. In some embodiments, the death receptor signal engager comprises a mammalian TRAIL molecule or death receptor molecule. In some embodiments, the death receptor signal engager comprises a truncated TRAIL molecule or death receptor molecule (e.g., relative to a wild-type TRAIL molecule or death receptor molecule).

[0884] In some embodiments, the death receptor signal engager comprises a truncated TRAIL molecule comprising at least residues corresponding to amino acids 95-281 of human TRAIL, e.g., a truncated TRAIL molecule comprising residues corresponding to amino acids 95-281 of human TRAIL. In some embodiments, the death receptor signal engager comprises a truncated TRAIL molecule comprising residues of 95-281 of human TRAIL.

[0885] In some embodiments, the death receptor signal engager comprises a truncated TRAIL molecule comprising at least residues corresponding to amino acids 122-281 of human TRAIL, e.g., a truncated TRAIL molecule comprising residues corresponding to amino acids 122-281 of human TRAIL. In some embodiments, the death receptor signal engager comprises a truncated TRAIL molecule comprising residues of 122-281 of human TRAIL.

[0886] In some embodiments, the death receptor signal engager comprises one, two, or three TRAIL molecules (e.g., the death receptor signal engager is a monomeric, dimeric, or trimeric TRAIL molecule, respectively). In some embodiments, the death receptor signal engager comprises one, two, or three death receptor molecules (e.g., the death receptor signal engager is a monomeric, dimeric, or trimeric death receptor molecule, respectively). In some embodiments, the death receptor signal engager comprises one, two, or three antigen binding domains that specifically bind to a death receptor (e.g., to one or more death receptors, e.g., the same or different death receptors)

[0887] In some embodiments, the death receptor signal engager comprises an amino acid sequence selected from Table 11 (or an amino acid sequence having at least about 77%, 80%, 85%, 90%, 95%, or 99% sequence identity to a sequence selected from Table 11).

[0888] In some embodiments, the death receptor signal engager comprises an amino acid sequence of SEQ ID NO: 6157 (or an amino acid sequence having at least about 77%, 80%, 85%, 90%, 95%, or 99% sequence identity to SEQ ID NO: 6157).

[0889] In some embodiments, the death receptor signal engager comprises an amino acid sequence of SEQ ID NO: 6158 (or an amino acid sequence having at least about 77%, 80%, 85%, 90%, 95%, or 99% sequence identity to SEQ ID NO: 6158).

[0890] In some embodiments, the death receptor signal engager comprises an amino acid sequence of SEQ ID NO: 6159 (or an amino acid sequence having at least about 77%, 80%, 85%, 90%, 95%, or 99% sequence identity to SEQ ID NO: 6159).

[0891] In some embodiments, the death receptor signal engager comprises an amino acid sequence of SEQ ID NO: 6160 (or an amino acid sequence having at least about 77%, 80%, 85%, 90%, 95%, or 99% sequence identity to SEQ ID NO: 6160).

[0892] In some embodiments, the death receptor signal engager comprises an amino acid sequence of SEQ ID NO: 6161 (or an amino acid sequence having at least about 77%, 80%, 85%, 90%, 95%, or 99% sequence identity to SEQ ID NO: 6161).

[0893] In some embodiments, the death receptor signal engager comprises an amino acid sequence of SEQ ID NO: 6162 (or an amino acid sequence having at least about 77%, 80%, 85%, 90%, 95%, or 99% sequence identity to SEQ ID NO: 6162).

[0894] In some embodiments, the death receptor signal engager comprises an amino acid sequence of SEQ ID NO: 6163 (or an amino acid sequence having at least about 77%, 80%, 85%, 90%, 95%, or 99% sequence identity to SEQ ID NO: 6163).

[0895] In some embodiments, the death receptor signal engager comprises an amino acid sequence of SEQ ID NO: 6164 (or an amino acid sequence having at least about 77%, 80%, 85%, 90%, 95%, or 99% sequence identity to SEQ ID NO: 6164).

[0896] In some embodiments, the death receptor signal engager comprises an amino acid sequence of SEQ ID NO: 6165 (or an amino acid sequence having at least about 77%, 80%, 85%, 90%, 95%, or 99% sequence identity to SEQ ID NO: 6165).

[0897] In some embodiments, the death receptor signal engager is comprised on the same polypeptide chain as another component of a multifunctional molecule of the present disclosure, e.g., the death receptor signal engager is comprised on the same polypeptide chain as a heavy and/or light chain of a first antigen binding domain that preferentially binds to a TCRBV antigen (e.g., a TCRBV antigen corresponding to a biased TCRBV clonotype) on a lymphocyte cell (e.g., T cell), an immune cell engager, a cytokine molecule, or a cytokine inhibitor molecule, e.g., as a fusion protein. In some embodiments, the multifunctional molecule comprises a fusion protein comprising a death receptor signal engager and light chain of a first antigen binding domain that preferentially binds to a TCRBV antigen (e.g., a TCRBV antigen corresponding to a biased TCRBV clonotype). In some embodiments, the multifunctional molecule comprises a fusion protein comprising a death receptor signal engager and a light chain of a first antigen binding domain that selectively targets lymphocytes expressing a TCRBV antigen (e.g., a TCRBV antigen corresponding to a biased TCRBV clonotype).

TABLE 11
Exemplary death receptor signal engagers

| SEQ | | Descrip- | |
|---|---|---|---|
| ID NO | ID Ref. | tion | Sequence |
| SEQ | monomeric_ | Monomeric | METDTLLLWVLLLWV |
| ID NO: | hTRAIL_ | human | PGSTGDYKDDDDKGG |
| 6157 | aa122_ | TRAIL | GGSGTGGAAAHITGT |
| | 281- | comprising | RGRSNTLSSPNSKNE |
| | hFc_ | residues | KALGRKINSWESSRS |
| | Knob_ | 122-281 | GHSFLSNLHLRNGEL |
| | Cys- | | VIHEKGFYYIYSQTY |
| | Blank | | FRFQEEIKENTKNDK |
| | | | QMVQYIYKYTSYPDP |
| | | | ILLMKSARNSCWSKD |
| | | | AEYGLYSIYQGGIFE |
| | | | LKENDRIFVSVTNEH |
| | | | LIDMDHEASFFGAFA |
| | | | VSGSGNGTSNGTSGS |
| | | | SGGDKTHTCPPCPAP |
| | | | ELLGGPSVFLFPPKP |
| | | | KDTLMISRTPEVTCV |
| | | | VVDVSHEDPEVKFNW |
| | | | YVDGVEVHNAKTKPR |
| | | | EEQYNSTYRVVSVLT |
| | | | VLHQDWLNGKEYKCK |
| | | | VSNKALPAPIEKTIS |
| | | | KAKGQPREPQVYTLP |
| | | | PCREEMTKNQVSLWC |
| | | | LVKGFYPSDIAVEWE |
| | | | SNGQPENNYKTTPPV |
| | | | LDSDGSFFLYSKLTV |
| | | | DKSRWQQGNVFSCSV |
| | | | MHEALHNHYTQKSLS |
| | | | LSPGK |
| SEQ | dimeric_ | Dimeric | METDTLLLWVLLLWV |
| ID NO: | hTRAIL_ | human | PGSTGDYKDDDDKGG |
| 6158 | aa122_ | TRAIL | GGSGTGGAAAHITGT |
| | 281- | comprising | RGRSNTLSSPNSKNE |
| | hFc_ | residues | KALGRKINSWESSRS |
| | Knob_ | 122-281 | GHSFLSNLHLRNGEL |
| | Cys- | | VIHEKGFYYIYSQTY |
| | Blank | | FRFQEEIKENTKNDK |
| | | | QMVQYIYKYTSYPDP |
| | | | ILLMKSARNSCWSKD |
| | | | AEYGLYSIYQGGIFE |
| | | | LKENDRIFVSVTNEH |
| | | | LIDMDHEASFFGAFA |
| | | | VSGAAAHITGTRGRS |
| | | | NTLSSPNSKNEKALG |
| | | | RKlNSWESSRSGHSF |
| | | | LSNLHLRNGELVIHE |
| | | | KGFYYIYSQTYFRFQ |
| | | | EEIKENTKNDKQMVQ |
| | | | YIYKYTSYPDPILLM |
| | | | KSARNSCWSKDAEYG |
| | | | LYSIYQGGIFELKEN |
| | | | DRIFVSVTNEHLIDM |
| | | | DHEASFFGAFAVSGS |
| | | | GNGTSNGTSGSSGGD |
| | | | KTHTCPPCPAPELLG |
| | | | GPSVFLFPPKPKDTL |
| | | | MISRTPEVTCVVVDV |
| | | | SHEDPEVKFNWYVDG |
| | | | VEVHNAKTKPREEQY |
| | | | NSTYRVVSVLTVLHQ |
| | | | DWLNGKEYKCKVSNR |
| | | | ALPAPIEKTISKAKG |
| | | | QPREPQVYTLPPCRE |
| | | | EMTKNQVSLWCLVKG |
| | | | FYPSDIAVEWESNGQ |
| | | | PENNYKTTPPVLDSD |
| | | | GSFFLYSKLTVDKSR |
| | | | WQQGNVFSCSVMHEA |
| | | | LHNHYTQKSLSLSPG |
| | | | K |
| SEQ | Trimerich_ | Trimeric | METDTLLLWVLLLWV |
| ID NO: | TRAIL_ | human | PGSTGDYKDDDDKGG |
| 6159 | Aa122_ | TRAIL | GGSGTGGAAAHITGT |
| | 281- | comprising | RGRSNTLSSPNSKNE |
| | hFc_ | residues | KALGRKINSWESSRS |
| | Knob_ | 122-281 | GHSFLSNLHLRNGEL |
| | Cys- | | VIHEKGFYYIYSQTY |
| | Blank | | FRFQEEIKENTKNDK |
| | | | QMVQYIYKYTSYPDP |
| | | | ILLMKSARNSCWSKD |
| | | | AEYGLYSIYQGGIFE |
| | | | LKENDRIFVSVTNEH |
| | | | LIDMDHEASFFGAFA |
| | | | VSGAAAHITGTRGRS |
| | | | NTLSSPNSKNEKALG |
| | | | RKINSWESSRSGHSF |
| | | | LSNLHLRNGELVIHE |
| | | | KGFYYIYSQTYFRFQ |
| | | | EEIKENTKNDKQMVQ |
| | | | YIYKYTSYPDPILLM |
| | | | KSARNSCWSKDAEYG |
| | | | LYSIYQGGIFELKEN |
| | | | DRIFVSVTNEHLIDM |
| | | | DHEASFFGAFAVSGA |
| | | | AAHITGTRGRSNTLS |
| | | | SPNSKNEKALGRKIN |
| | | | SWESSRSGHSFLSNL |
| | | | HLRNGELVIHEKGFY |
| | | | YIYSQTYFRFQEEIK |
| | | | ENTKNDKQMVQYIYK |
| | | | YTSYPDPILLMKSAR |
| | | | NSCWSKDAEYGLYSI |
| | | | YQGGIFELKENDRIF |
| | | | VSVTNEHLIDMDHEA |
| | | | SFFGAFAVSGSGNGT |
| | | | SNGTSGSSGGDKTHT |
| | | | CPPCPAPELLGGPSV |
| | | | FLFPPKPKDTLMISR |
| | | | TPEVTCVVVDVSHED |
| | | | PEVKFNWYVDGVEVH |
| | | | NAKTKPREEQYNSTY |
| | | | RVVSVLTVLHQDWLN |
| | | | GKEYKCKVSNKALPA |
| | | | PIEKTISKAKGQPRE |
| | | | PQVYTLPPCREEMTK |
| | | | NQVSLWCLVKGFYPS |
| | | | DIAVEWESNGQPENN |
| | | | YKTTPPVLDSDGSFF |
| | | | LYSKLTVDKSRWQQG |
| | | | NVFSCSVMHEALHNH |
| | | | YTQKSLSLSPGK |
| SEQ | Monomeric_ | Monomeric | METDTLLLWVLLLWV |
| ID NO: | hTRAIL_ | human | PGSTGTSEETISTVQ |
| 6160 | 95-281- | TRAIL | EKQQNISPLVRERGP |
| | hFc_ | comprising | QRVAAHITGTRGRSN |
| | Knob_ | residues | TLSSPNSKNEKALGR |
| | Cys- | 95-281 | KINSWESSRSGHSFL |
| | Blank | | SNLHLRNGELVIHEK |
| | | | GFYYIYSQTYFRFQE |
| | | | EIKENTKNDKQMVQY |
| | | | IYKYTSYPDPILLMK |
| | | | SARNSCWSKDAEYGL |
| | | | YSIYQGGIFELKEND |
| | | | RIFVSVTNEHLIDMD |
| | | | HEASFFGAFLVGGGG |
| | | | GSGGGGSDKTHTCPP |
| | | | CPAPELLGGPSVFLF |
| | | | PPKPKDTLMISRTPE |
| | | | VTCVVVDVSHEDPEV |
| | | | KFNWYVDGVEVHNAK |
| | | | TKPREEQYNSTYRVV |
| | | | SVLTVLHQDWLNGKE |
| | | | YKCKVSNKALPAPIE |
| | | | KTISKAKGQPREPQV |
| | | | YTLPPCREEMTKNQV |
| | | | SLWCLVKGFYPSDIA |
| | | | VEWESNGQPENNYKT |
| | | | TPPVLDSDGSFFLYS |
| | | | KLTVDKSRWQQGNVF |
| | | | SCSVMHEALHNHYTQ |
| | | | KSLSLSPGK |
| SEQ | Dimeric_ | Dimeric | METDTLLLWVLLLWV |
| ID NO: | hTRAIL_ | human | PGSTGTSEETISTVQ |
| 6161 | 95-281- | TRAIL | EKQQNISPLVRERGP |
| | hFc_ | comprising | QRVAAHITGTRGRSN |
| | Knob_ | residues | TLSSPNSKNEKALGR |
| | Cys- | 95-281 | KINSWESSRSGHSFL |
| | Blank | | SNLHLRNGELVIHEK |
| | | | GFYYIYSQTYFRFQE |
| | | | EIKENTKNDKQMVQY |
| | | | IYKYTSYPDPILLMK |
| | | | SARNSCWSKDAEYGL |
| | | | YSIYQGGIFELKEND |
| | | | RIFVSVTNEHLIDMD |
| | | | HEASFFGAFLVGGGG |
| | | | GSGGGGSGTSEETIS |
| | | | TVQEKQQNISPLVRE |
| | | | RGPQRVAAHITGTRG |
| | | | RSNTLSSPNSKNEKA |
| | | | LGRKINSWESSRSGH |
| | | | SFLSNLHLRNGELVI |
| | | | HEKGFYYIYSQTYFR |
| | | | FQEEIKENTKNDKQM |
| | | | VQYIYKYTSYPDPIL |
| | | | LMKSARNSCWSKDAE |
| | | | YGLYSIYQGGIFELK |
| | | | ENDRIFVSVTNEHLI |
| | | | DMDHEASFFGAFLVG |
| | | | GGGGSGGGGSDKTHT |
| | | | CPPCPAPELLGGPSV |
| | | | FLFPPKPKDTLMISR |
| | | | TPEVTCVVVDVSHED |
| | | | PEVKFNWYVDGVEVH |
| | | | NAKTKPREEQYNSTY |
| | | | RVVSVLTVLHQDWLN |
| | | | GKEYKCKVSNKALPA |
| | | | PIEKTISKAKGQPRE |
| | | | PQVYTLPPCREEMTK |
| | | | NQVSLWCLVKGFYPS |
| | | | DIAVEWESNGQPENN |
| | | | YKTTPPVLDSDGSFF |
| | | | LYSKLTVDKSRWQQG |
| | | | NVFSCSVMHEALHNH |
| | | | YTQKSLSLSPGK |
| SEQ | Trimeric_ | Trimeric | METDTLLLWVLLL |
| ID NO: | hTRAIL_ | human | WVPGSTGTSEETI |
| 6162 | 95-281- | TRAIL | STVQEKQQNISPL |
| | hFc_ | comprising | VRERGPQRVAAHI |
| | Knob_ | residues | TGTRGRSNTLSSP |
| | Cys- | 95-281 | NSKNEKALGRKIN |
| | Blank | | SWESSRSGHSFLS |
| | | | NLHLRNGELVIHE |
| | | | KGFYYIYSQTYFR |
| | | | FQEEIKENTKNDK |
| | | | QMVQYIYKYTSYP |
| | | | DPILLMKSARNSC |
| | | | WSKDAEYGLYSIY |
| | | | QGGIFELKENDRI |
| | | | FVSVTNEHLIDMD |
| | | | HEASFFGAFLVGG |
| | | | GGGSGGGGSGTSE |
| | | | ETISTVQEKQQNI |
| | | | SPLVRERGPQRVA |
| | | | AHITGTRGRSNTL |
| | | | SSPNSKNEKALGR |
| | | | KINSWESSRSGHS |
| | | | FLSNLHLRNGELV |
| | | | IHEKGFYYIYSQT |
| | | | YFRFQEEIKENTK |
| | | | NDKQMVQYIYKYT |
| | | | SYPDPILLMKSAR |
| | | | NSCWSKDAEYGLY |
| | | | SIYQGGIFELKEN |
| | | | DRIFVSVTNEHLI |
| | | | DMDHEASFFGAFL |
| | | | VGGGGGSGGGGSG |
| | | | TSEETISTVQEKQ |
| | | | QNISPLVRERGPQ |
| | | | RVAAHITGTRGRS |
| | | | NTLSSPNSKNEKA |
| | | | LGRKINSWESSRS |
| | | | GHSFLSNLHLRNG |
| | | | ELVIHEKGFYYIY |
| | | | SQTYFRFQEEIKE |
| | | | NTKNDKQMVQYIY |
| | | | KYTSYPDPILLMK |
| | | | SARNSCWSKDAEY |
| | | | GLYSIYQGGIFEL |
| | | | KENDRIFVSVTNE |
| | | | HLIDMDHEASFFG |
| | | | AFLVGGGGGSGGG |
| | | | GSDKTHTCPPCPA |
| | | | PELLGGPSVFLFP |
| | | | PKPKDTLMISRTP |
| | | | EVTCVVVDVSHED |
| | | | PEVKFNWYVDGVE |
| | | | VHNAKTKPREEQY |
| | | | NSTYRVVSVLTVL |
| | | | HQDWLNGKEYKCK |
| | | | VSNKALPAPIEKT |
| | | | ISKAKGQPREPQV |
| | | | YTLPPCREEMTKN |
| | | | QVSLWCLVKGFYP |
| | | | SDIAVEWESNGQP |
| | | | ENNYKTTPPVLDS |
| | | | DGSFFLYSKLTVD |
| | | | KSRWQQGNVFSCS |
| | | | VMHEALHNHYTQK |
| | | | SLSLSPGK |
| SEQ | a_hDR5_ | Antigen | METDTLLLWVLLL |
| ID NO: | Tigatuzumab_ | binding | WVPGSTGEVQLVE |
| 6163 | scFv_VH_ | domain | SGGGLVQPGGSLR |
| | VL- | specific | LSCAASGFTFSSY |
| | hFc_Knob_ | to | VMSWVRQAPGKGL |
| | Cys-Blank | DR5, | EWVATISSGGSYT |
| | | a.k.a. | YYPDSVKGRFTIS |
| | | tigatuzumab | RDNAKNTLYLQMN |
| | | | SLRAEDTAVYYCA |
| | | | RRGDSMITTDYWG |
| | | | QGTLVTVSSGGGG |
| | | | SGGGGSGGGGSGG |
| | | | GGSDIQMTQSPSS |
| | | | LSASVGDRVTITC |
| | | | KASQDVGTAVAWY |
| | | | QQKPGKAPKLLIY |
| | | | WASTRHTGVPSRF |
| | | | SGSGSGTDFTLTI |
| | | | SSLQPEDFATYYC |
| | | | QQYSSYRTFGQGT |
| | | | KVEIKGGGGSGGG |
| | | | GSDKTHTCPPCPA |
| | | | PELLGGPSVFLFP |
| | | | PKPKDTLMISRTP |
| | | | EVTCVVVDVSHED |
| | | | PEVKFNWYVDGVE |
| | | | VHNAKTKPREEQY |
| | | | NSTYRVVSVLTVL |
| | | | HQDWLNGKEYKCK |
| | | | VSNKALPAPIEKT |
| | | | ISKAKGQPREPQV |
| | | | YTLPPCREEMTKN |
| | | | QVSLWCLVKGFYP |
| | | | SDIAVEWESNGQP |
| | | | ENNYKTTPPVLDS |
| | | | DGSFFLYSKLTVD |
| | | | KSRWQQGNVFSCS |
| | | | VMHEALHNHYTQK |
| | | | SLSLSPGK |
| SEQ | a_hDR5_ | Antigen | METDTLLLWVLLL |
| ID NO: | Drozitumab_ | binding | WVPGSTGEVQLVQ |
| 6164 | scFv_VH_VL | domain | SGGGVERPGGSLR |
| | hFc_Knob_ | specific | LSCAASGFTFDDY |
| | Cys | to | AMSWVRQAPGKGL |
| | | DR5, | EWVSGINWQGGST |
| | | a.k.a. | GYADSVKGRVTIS |
| | | drozitumab | RDNAKNSLYLQMN |
| | | | SLRAEDTAVYYCA |
| | | | KILGAGRGWYFDY |
| | | | WGKGTTVTVSSGG |
| | | | GGSGGGGSGGGGS |
| | | | GGGGSSELTQDPA |
| | | | VSVALGQTVRITC |
| | | | SGDSLRSYYASWY |
| | | | QQKPGQAPVLVIY |
| | | | GANNRPSGIPDRF |
| | | | SGSSSGNTASLTI |
| | | | TGAQAEDEADYYC |
| | | | NSADSSGNHVVFG |
| | | | GGTKLTVLGGGGS |
| | | | GGGGSDKTHTCPP |
| | | | CPAPELLGGPSVF |
| | | | LFPPKPKDTLMIS |
| | | | RTPEVTCVVVDVS |
| | | | HEDPEVKFNWYVD |
| | | | GVEVHNAKTKPRE |
| | | | EQYNSTYRVVSVL |
| | | | TVLHQDWLNGKEY |
| | | | KCKVSNKALPAPI |
| | | | EKTISKAKGQPRE |
| | | | PQVYTLPPCREEM |
| | | | TKNQVSLWCLVKG |
| | | | FYPSDIAVEWESN |
| | | | GQPENNYKTTPPV |
| | | | LDSDGSFFLYSKL |
| | | | TVDKSRWQQGNVF |
| | | | SCSVMHEALHNHY |
| | | | TQKSLSLSPGK |
| SEQ | A_hDR5_ | Antigen | METDTLLLWVLLL |
| ID NO: | Conatumumab_ | binding | WVPGSTGQVQLQE |
| 6165 | scFv_VH | domain | SGPGLVKPSQTLS |
| | VL- | specific | LTCTVSGGSISSG |
| | hFc_ | to | DYFWSWIRQLPGK |
| | Knob | DR5, | GLEWIGHIHNSGT |
| | Cys | a.k.a. | TYYNPSLKSRVTI |
| | | conatumumab | SVDTSKKQFSLRL |
| | | | SSVTAADTAVYYC |
| | | | ARDRGGDYYYGMD |
| | | | VWGQGTTVTVSSG |
| | | | GGGSGGGGSGGGG |
| | | | SGGGGSEIVLTQS |
| | | | PGTLSLSPGERAT |
| | | | LSCRASQGISRSY |
| | | | LAWYQQKPGQAPS |
| | | | LLIYGASSRATGI |
| | | | PDRFSGSGSGTDF |
| | | | TLTISRLEPEDFA |
| | | | VYYCQQFGSSPWT |
| | | | FGQGTKVEIKRGG |
| | | | GGSGGGGSDKTHT |
| | | | CPPCPAPELLGGP |
| | | | SVFLFPPKPKDTL |
| | | | MISRTPEVTCVVV |
| | | | DVSHEDPEVKFNW |
| | | | YVDGVEVHNAKTK |
| | | | PREEQYNSTYRVV |
| | | | SVLTVLHQDWLNG |
| | | | KEYKCKVSNKALP |
| | | | APIEKTISKAKGQ |
| | | | PREPQVYTLPPCR |
| | | | EEMTKNQVSLWCL |
| | | | VKGFYPSDIAVEW |
| | | | ESNGQPENNYKTT |
| | | | PPVLDSDGSFFLY |
| | | | SKLTVDKSRWQQG |
| | | | NVFSCSVMHEALH |
| | | | NHYTQKSLSLSPGK |

### T Cell Engagers

[0898] The present disclosure provides, inter alia, multispecific (e.g., bi-, tri-, quad-specific) or multifunctional molecules, that are engineered to contain one or more T cell engager that mediate binding to and/or activation of a T cell. Accordingly, in some embodiments, the T cell engager is selected from an antigen binding domain or ligand that binds to (e.g., and in some embodiments activates) one or more of CD3, TCRα, TCRβ, TCRγ, TCRζ, ICOS, CD28, CD27, HVEM, LIGHT, CD40, 4-1BB, OX40, DR3, GITR, CD30, TIMI, SLAM, CD2, or CD226. In other embodiments, the T cell engager is selected from an antigen binding domain or ligand that binds to and does not activate one or more of CD3, TCRα, TCRβ, TCRγ, TCRζ, ICOS, CD28, CD27, HVEM, LIGHT, CD40, 4-1BB, OX40, DR3, GITR, CD30, TIMI, SLAM, CD2, or CD226.

### B Cell, Macrophage & Dendritic Cell Engagers

[0899] Broadly, B cells, also known as B lymphocytes, are a type of white blood cell of the lymphocyte subtype. They function in the humoral immunity component of the adaptive immune system by secreting antibodies. Additionally, B cells present antigen (they are also classified as professional antigen-presenting cells (APCs)) and secrete cytokines. Macrophages are a type of white blood cell that engulfs and digests cellular debris, foreign substances, microbes, cancer cells via phagocytosis. Besides phagocytosis, they play important roles in nonspecific defense (innate immunity) and also help initiate specific defense mechanisms (adaptive immunity) by recruiting other immune cells such as lymphocytes. For example, they are important as antigen presenters to T cells. Beyond increasing inflammation and stimulating the immune system, macrophages also play an important anti-inflammatory role and can decrease immune reactions through the release of cytokines. Dendritic cells (DCs) are antigen-presenting cells that function in processing antigen material and present it on the cell surface to the T cells of the immune system.

[0900] The present disclosure provides, inter alia, multispecific (e.g., bi-, tri-, quad-specific) or multifunctional molecules, that include, e.g., are engineered to contain, one or more B cell, macrophage, and/or dendritic cell engager that mediate binding to and/or activation of a B cell, macrophage, and/or dendritic cell.

[0901] Accordingly, in some embodiments, the immune cell engager comprises a B cell, macrophage, and/or dendritic cell engager chosen from one or more of CD40 ligand (CD40L) or a CD70 ligand; an antibody molecule that binds to CD40 or CD70; an antibody molecule to OX40; an OX40 ligand (OX40L); an agonist of a Toll-like receptor (e.g., as described herein, e.g., a TLR4, e.g., a constitutively active TLR4 (caTLR4), or a TLR9 agonists); a 41BB; a CD2; a CD47; or a STING agonist, or a combination thereof.

[0902] In some embodiments, the B cell engager is a CD40L, an OX40L, or a CD70 ligand, or an antibody molecule that binds to OX40, CD40 or CD70.

[0903] In some embodiments, the macrophage engager is a CD2 agonist. In some embodiments, the macrophage engager is an antigen binding domain that binds to: CD40L or antigen binding domain or ligand that binds CD40, a Toll like receptor (TLR) agonist (e.g., as described herein), e.g., a TLR9 or TLR4 (e.g., caTLR4 (constitutively active TLR4), CD47, or a STING agonist. In some embodiments, the STING agonist is a cyclic dinucleotide, e.g., cyclic di-GMP (cdGMP) or cyclic di-AMP (cdAMP). In some embodiments, the STING agonist is biotinylated.

[0904] In some embodiments, the dendritic cell engager is a CD2 agonist. In some embodiments, the dendritic cell engager is a ligand, a receptor agonist, or an antibody molecule that binds to one or more of: OX40L, 41BB, a TLR agonist (e.g., as described herein) (e.g., TLR9 agonist, TLR4 (e.g., caTLR4 (constitutively active TLR4)), CD47, or and a STING agonist. In some embodiments, the STING agonist is a cyclic dinucleotide, e.g., cyclic di-GMP (cdGMP) or cyclic di-AMP (cdAMP). In some embodiments, the STING agonist is biotinylated.

[0905] In other embodiments, the immune cell engager mediates binding to, or activation of, one or more of a B cell, a macrophage, and/or a dendritic cell. Exemplary B cell, macrophage, and/or dendritic cell engagers can be chosen from one or more of CD40 ligand (CD40L) or a CD70 ligand; an antibody molecule that binds to CD40 or CD70; an antibody molecule to OX40; an OX40 ligand (OX40L); a Toll-like receptor agonist (e.g., a TLR4, e.g., a constitutively active TLR4 (caTLR4) or a TLR9 agonist); a 41BB agonist; a CD2; a CD47; or a STING agonist, or a combination thereof.

[0906] In some embodiments, the B cell engager is chosen from one or more of a CD40L, an OX40L, or a CD70 ligand, or an antibody molecule that binds to OX40, CD40 or CD70.

[0907] In other embodiments, the macrophage cell engager is chosen from one or more of a CD2 agonist; a CD40L; an OX40L; an antibody molecule that binds to OX40, CD40 or CD70; a Toll-like receptor agonist or a fragment thereof (e.g., a TLR4, e.g., a constitutively active TLR4 (caTLR4)); a CD47 agonist; or a STING agonist.

[0908] In other embodiments, the dendritic cell engager is chosen from one or more of a CD2 agonist, an OX40 antibody, an OX40L, 41BB agonist, a Toll-like receptor agonist or a fragment thereof (e.g., a TLR4, e.g., a constitutively active TLR4 (caTLR4)), CD47 agonist, or a STING agonist.

[0909] In one embodiment, the OX40L comprises the amino acid sequence: QVSHRYPRIQSIKVQFTEYKKEKGFILTSQKEDEIMKVQNNSVIINCDGFYLISLKGYFSQ EVNISLHYQKDEEPLFQLKKVRSVNSLMVASLTYKDKVYLNVTTDNTSLDDFHVNGGE LILIHQNPGEFCVL (SEQ ID NO: 7245), a fragment thereof, or an amino acid sequence substantially identical thereto (e.g., 95% to 99.9% identical thereto, or having at least one amino acid alteration, but not more than five, ten or fifteen alterations (e.g., substitutions, deletions, or insertions, e.g., conservative substitutions) to the amino acid sequence of SEQ ID NO: 7245.

[0910] In another embodiment, the CD40L comprises the amino acid sequence: MQKGDQNPQIAAHVISEASSKTTSVLQWAEKGYYTMSNNLVTLENGKQLTVKRQGLY YIYAQVTFCSNREASSQAPFIASLCLKSPGRFERILLRAANTHSSAKPCGQQSIHLGGVFE LQPGASVFVNVTDPSQVSHGTGFTSFGLLKL (SEQ ID NO: 7246), a fragment thereof, or an amino acid sequence substantially identical thereto (e.g., 95% to 99.9% identical thereto, or having at least one amino acid alteration, but not more than five, ten or fifteen alterations (e.g., substitutions, deletions, or insertions, e.g., conservative substitutions) to the amino acid sequence of SEQ ID NO: 7246.

[0911] In yet other embodiments, the STING agonist comprises a cyclic dinucleotide, e.g., a cyclic di-GMP (cdGMP), a cyclic di-AMP (cdAMP), or a combination thereof, optionally with 2′,5′ or 3′,5′ phosphate linkages.

[0912] In one embodiment, the immune cell engager includes 41BB ligand, e.g., comprising the amino acid sequence: ACPWAVSGARASPGSAASPRLREGPELSPDDPAGLLDLRQGMFAQLVAQNVLLIDGPLS WYSDPGLAGVSLTGGLSYKEDTKELVVAKAGVYYVFFQLELRRVVAGEGSGSVSLALH LQPLRSAAGAAALALTVDLPPASSEARNSAFGFQGRLLHLSAGQRLGVHLHTEARARH AWQLTQGATVLGLFRVTPEIPAGLPSPRSE (SEQ ID NO: 7247), a fragment thereof, or an amino acid sequence substantially identical thereto (e.g., 95% to 99.9% identical thereto, or having at least one amino acid alteration, but not more than five, ten or fifteen alterations (e.g., substitutions, deletions, or insertions, e.g., conservative substitutions) to the amino acid sequence of SEQ ID NO: 7247.

### Toll-Like Receptors

[0913] Toll-Like Receptors (TLRs) are evolutionarily conserved receptors are homologues of the Drosophila Toll protein, and recognize highly conserved structural motifs known as pathogen-associated microbial patterns (PAMPs), which are exclusively expressed by microbial pathogens, or danger-associated molecular patterns (DAMPs) that are endogenous molecules released from necrotic or dying cells. PAMPs include various bacterial cell wall components such as lipopolysaccharide (LPS), peptidoglycan (PGN) and lipopeptides, as well as flagellin, bacterial DNA and viral double-stranded RNA. DAMPs include intracellular proteins such as heat shock proteins as well as protein fragments from the extracellular matrix. Stimulation of TLRs by the corresponding PAMPs or DAMPs initiates signaling cascades leading to the activation of transcription factors, such as AP-1, NF-κB and interferon regulatory factors (IRFs). Signaling by TLRs results in a variety of cellular responses, including the production of interferons (IFNs), pro-inflammatory cytokines and effector cytokines that direct the adaptive immune response. TLRs are implicated in a number of inflammatory and immune disorders and play a role in cancer (Rakoff-Nahoum S. & Medzhitov R., 2009. Toll-like receptors and cancer. Nat Revs Cancer 9:57-63.)

[0914] TLRs are type I transmembrane proteins characterized by an extracellular domain containing leucine-rich repeats (LRRs) and a cytoplasmic tail that contains a conserved region called the Toll/IL-1 receptor (TIR) domain. Ten human and twelve murine TLRs have been characterized, TLR1 to TLR10 in humans, and TLR1 to TLR9, TLR11, TLR12 and TLR13 in mice, the homolog of TLR10 being a pseudogene. TLR2 is essential for the recognition of a variety of PAMPs from Gram-positive bacteria, including bacterial lipoproteins, lipomannans and lipoteichoic acids. TLR3 is implicated in virus-derived double-stranded RNA. TLR4 is predominantly activated by lipopolysaccharide. TLR5 detects bacterial flagellin and TLR9 is required for response to unmethylated CpG DNA. Finally, TLR7 and TLR8 recognize small synthetic antiviral molecules, and single-stranded RNA was reported to be their natural ligand. TLR11 has been reported to recognize uropathogenic E. coli and a profilin-like protein from Toxoplasma gondii. The repertoire of specificities of the TLRs is apparently extended by the ability of TLRs to heterodimerize with one another. For example, dimers of TLR2 and TLR6 are required for responses to diacylated lipoproteins while TLR2 and TLR1 interact to recognize triacylated lipoproteins. Specificities of the TLRs are also influenced by various adapter and accessory molecules, such as MD-2 and CD14 that form a complex with TLR4 in response to LPS.

[0915] TLR signaling consists of at least two distinct pathways: a MyD88-dependent pathway that leads to the production of inflammatory cytokines, and a MyD88-independent pathway associated with the stimulation of IFN-β and the maturation of dendritic cells. The MyD88-dependent pathway is common to all TLRs, except TLR3 (Adachi O. et al., 1998. Targeted disruption of the MyD88 gene results in loss of IL-1- and IL-18-mediated function. Immunity. 9(1):143-50). Upon activation by PAMPs or DAMPs, TLRs hetero- or homodimerize inducing the recruitment of adaptor proteins via the cytoplasmic TIR domain. Individual TLRs induce different signaling responses by usage of the different adaptor molecules. TLR4 and TLR2 signaling requires the adaptor TIRAP/Mal, which is involved in the MyD88-dependent pathway. TLR3 triggers the production of IFN-β in response to double-stranded RNA, in a MyD88-independent manner, through the adaptor TRIF/TICAM-1. TRAM/TICAM-2 is another adaptor molecule involved in the MyD88-independent pathway which function is restricted to the TLR4 pathway.

[0916] TLR3, TLR7, TLR8 and TLR9 recognize viral nucleic acids and induce type I IFNs. The signaling mechanisms leading to the induction of type I IFNs differ depending on the TLR activated. They involve the interferon regulatory factors, IRFs, a family of transcription factors known to play a critical role in antiviral defense, cell growth and immune regulation. Three IRFs (IRF3, IRF5 and IRF7) function as direct transducers of virus-mediated TLR signaling. TLR3 and TLR4 activate IRF3 and IRF7, while TLR7 and TLR8 activate IRF5 and IRF7 (Doyle S. et al., 2002. IRF3 mediates a TLR3/TLR4-specific antiviral gene program. Immunity. 17(3):251-63). Furthermore, type I IFN production stimulated by TLR9 ligand CpG-A has been shown to be mediated by PI(3)K and mTOR (Costa-Mattioli M. & Sonenberg N. 2008. RAPping production of type I interferon in pDCs through mTOR. Nature Immunol. 9: 1097-1099).

[0917] TLR-9

[0918] TLR9 recognizes unmethylated CpG sequences in DNA molecules. CpG sites are relatively rare (˜1%) on vertebrate genomes in comparison to bacterial genomes or viral DNA. TLR9 is expressed by numerous cells of the immune system such as B lymphocytes, monocytes, natural killer (NK) cells, and plasmacytoid dendritic cells. TLR9 is expressed intracellularly, within the endosomal compartments and functions to alert the immune system of viral and bacterial infections by binding to DNA rich in CpG motifs. TLR9 signals leads to activation of the cells initiating pro-inflammatory reactions that result in the production of cytokines such as type-I interferon and IL-12.

[0919] TLR Agonists

[0920] A TLR agonist can agonize one or more TLR, e.g., one or more of human TLR-1, 2, 3, 4, 5, 6, 7, 8, 9, or 10. In some embodiments, an adjunctive agent described herein is a TLR agonist. In some embodiments, the TLR agonist specifically agonizes human TLR-9. In some embodiments, the TLR-9 agonist is a CpG moiety. As used herein, a CpG moiety, is a linear dinucleotide having the sequence: 5′-C-phosphate-G-3′, that is, cytosine and guanine separated by only one phosphate.

[0921] In some embodiments, the CpG moiety comprises at least 1, 2, 3, 4, 5, 6, 7, 8, 9, 10, 11, 12, 13, 14, 15, 16, 17, 18, 19, 20, 21, 22, 23, 24, 25, 26, 27, 28, 29, 30, or more CpG dinucleotides. In some embodiments, the CpG moiety consists of 1, 2, 3, 4, 5, 6, 7, 8, 9, 10, 11, 12, 13, 14, 15, 16, 17, 18, 19, 20, 21, 22, 23, 24, 25, 26, 27, 28, 29, or 30 CpG dinucleotides. In some embodiments, the CpG moiety has 1-5, 1-10, 1-20, 1-30, 1-40, 1-50, 5-10, 5-20, 5-30, 10-20, 10-30, 10-40, or 10-50 CpG dinucleotides.

[0922] In some embodiments, the TLR-9 agonist is a synthetic ODN (oligodeoxynucleotides). CpG ODNs are short synthetic single-stranded DNA molecules containing unmethylated CpG dinucleotides in particular sequence contexts (CpG motifs). CpG ODNs possess a partially or completely phosphorothioated (PS) backbone, as opposed to the natural phosphodiester (PO) backbone found in genomic bacterial DNA. There are three major classes of CpG ODNs: classes A, B and C, which differ in their immunostimulatory activities. CpG-A ODNs are characterized by a PO central CpG-containing palindromic motif and a PS-modified 3′ poly-G string. They induce high IFN-α production from pDCs but are weak stimulators of TLR9-dependent NF-κB signaling and pro-inflammatory cytokine (e.g. IL-6) production. CpG-B ODNs contain a full PS backbone with one or more CpG dinucleotides. They strongly activate B cells and TLR9-dependent NF-κB signaling but weakly stimulate IFN-α secretion. CpG-C ODNs combine features of both classes A and B. They contain a complete PS backbone and a CpG-containing palindromic motif. C-Class CpG ODNs induce strong IFN-α production from pDC as well as B cell stimulation.

### Linkers

[0923] The multispecific or multifunctional molecule disclosed herein can further include a linker, e.g., a linker between one or more of: the antigen binding domain and the cytokine molecule, the antigen binding domain and the immune cell engager, the antigen binding domain and the stromal modifying moiety, the cytokine molecule and the immune cell engager, the cytokine molecule and the stromal modifying moiety, the immune cell engager and the stromal modifying moiety, the antigen binding domain and the immunoglobulin chain constant region, the cytokine molecule and the immunoglobulin chain constant region, the immune cell engager and the immunoglobulin chain constant region, or the stromal modifying moiety and the immunoglobulin chain constant region. In embodiments, the linker is chosen from: a cleavable linker, a non-cleavable linker, a peptide linker, a flexible linker, a rigid linker, a helical linker, or a non-helical linker, or a combination thereof.

[0924] In one embodiment, the multispecific molecule can include one, two, three or four linkers, e.g., a peptide linker. In one embodiment, the peptide linker includes Gly and Ser. In some embodiments, the peptide linker is selected from GGGGS (SEQ ID NO: 7248); GGGGSGGGGS (SEQ ID NO: 7249); GGGGSGGGGSGGGGS (SEQ ID NO: 7250); and DVPSGPGGGGGSGGGGS (SEQ ID NO: 7251). In some embodiments, the peptide linker is a A(EAAAK)nA (SEQ ID NO: 7291) family of linkers (e.g., as described in Protein Eng. (2001) 14 (8): 529-532). These are stiff helical linkers with n ranging from 2-5. In some embodiments, the peptide linker is selected from AEAAAKEAAAKAAA (SEQ ID NO: 7252); AEAAAKEAAAKEAAAKAAA (SEQ ID NO: 7253); AEAAAKEAAAKEAAAKEAAAKAAA (SEQ ID NO: 77); and AEAAAKEAAAKEAAAKEAAAKEAAAKAAA (SEQ ID NO: 78).

### Nucleic Acids

[0925] Nucleic acids encoding the aforementioned multispecific or multifunctional molecules are also disclosed.

[0926] In certain embodiments, the invention features nucleic acids comprising nucleotide sequences that encode heavy and light chain variable regions and CDRs or hypervariable loops of the antibody molecules, as described herein. For example, the invention features a first and second nucleic acid encoding heavy and light chain variable regions, respectively, of an antibody molecule chosen from one or more of the antibody molecules disclosed herein. The nucleic acid can comprise a nucleotide sequence as set forth in the tables herein, or a sequence substantially identical thereto (e.g., a sequence at least about 85%, 90%, 95%, 99% or more identical thereto, or which differs by no more than 3, 6, 15, 30, or 45 nucleotides from the sequences shown in the tables herein.

[0927] In certain embodiments, the nucleic acid can comprise a nucleotide sequence encoding at least one, two, or three CDRs or hypervariable loops from a heavy chain variable region having an amino acid sequence as set forth in the tables herein, or a sequence substantially homologous thereto (e.g., a sequence at least about 85%, 90%, 95%, 99% or more identical thereto, and/or having one or more substitutions, e.g., conserved substitutions). In other embodiments, the nucleic acid can comprise a nucleotide sequence encoding at least one, two, or three CDRs or hypervariable loops from a light chain variable region having an amino acid sequence as set forth in the tables herein, or a sequence substantially homologous thereto (e.g., a sequence at least about 85%, 90%, 95%, 99% or more identical thereto, and/or having one or more substitutions, e.g., conserved substitutions). In yet another embodiment, the nucleic acid can comprise a nucleotide sequence encoding at least one, two, three, four, five, or six CDRs or hypervariable loops from heavy and light chain variable regions having an amino acid sequence as set forth in the tables herein, or a sequence substantially homologous thereto (e.g., a sequence at least about 85%, 90%, 95%, 99% or more identical thereto, and/or having one or more substitutions, e.g., conserved substitutions).

[0928] In certain embodiments, the nucleic acid can comprise a nucleotide sequence encoding at least one, two, or three CDRs or hypervariable loops from a heavy chain variable region having the nucleotide sequence as set forth in the tables herein, a sequence substantially homologous thereto (e.g., a sequence at least about 85%, 90%, 95%, 99% or more identical thereto, and/or capable of hybridizing under the stringency conditions described herein). In another embodiment, the nucleic acid can comprise a nucleotide sequence encoding at least one, two, or three CDRs or hypervariable loops from a light chain variable region having the nucleotide sequence as set forth in the tables herein, or a sequence substantially homologous thereto (e.g., a sequence at least about 85%, 90%, 95%, 99% or more identical thereto, and/or capable of hybridizing under the stringency conditions described herein). In yet another embodiment, the nucleic acid can comprise a nucleotide sequence encoding at least one, two, three, four, five, or six CDRs or hypervariable loops from heavy and light chain variable regions having the nucleotide sequence as set forth in the tables herein, or a sequence substantially homologous thereto (e.g., a sequence at least about 85%, 90%, 95%, 99% or more identical thereto, and/or capable of hybridizing under the stringency conditions described herein).

[0929] In certain embodiments, the nucleic acid can comprise a nucleotide sequence encoding a cytokine molecule, an immune cell engager, or a stromal modifying moiety disclosed herein.

[0930] In another aspect, the application features host cells and vectors containing the nucleic acids described herein. The nucleic acids may be present in a single vector or separate vectors present in the same host cell or separate host cell, as described in more detail hereinbelow.

### Vectors

[0931] Further provided herein are vectors comprising the nucleotide sequences encoding a multispecific or multifunctional molecule described herein. In one embodiment, the vectors comprise nucleotides encoding a multispecific or multifunctional molecule described herein. In one embodiment, the vectors comprise the nucleotide sequences described herein. The vectors include, but are not limited to, a virus, plasmid, cosmid, lambda phage or a yeast artificial chromosome (YAC).

[0932] Numerous vector systems can be employed. For example, one class of vectors utilizes DNA elements which are derived from animal viruses such as, for example, bovine papilloma virus, polyoma virus, adenovirus, vaccinia virus, baculovirus, retroviruses (Rous Sarcoma Virus, MMTV or MOMLV) or SV40 virus. Another class of vectors utilizes RNA elements derived from RNA viruses such as Semliki Forest virus, Eastern Equine Encephalitis virus and Flaviviruses.

[0933] Additionally, cells which have stably integrated the DNA into their chromosomes may be selected by introducing one or more markers which allow for the selection of transfected host cells. The marker may provide, for example, prototropy to an auxotrophic host, biocide resistance (e.g., antibiotics), or resistance to heavy metals such as copper, or the like. The selectable marker gene can be either directly linked to the DNA sequences to be expressed, or introduced into the same cell by cotransformation. Additional elements may also be needed for optimal synthesis of mRNA. These elements may include splice signals, as well as transcriptional promoters, enhancers, and termination signals.

[0934] Once the expression vector or DNA sequence containing the constructs has been prepared for expression, the expression vectors may be transfected or introduced into an appropriate host cell. Various techniques may be employed to achieve this, such as, for example, protoplast fusion, calcium phosphate precipitation, electroporation, retroviral transduction, viral transfection, gene gun, lipid based transfection or other conventional techniques. In the case of protoplast fusion, the cells are grown in media and screened for the appropriate activity

[0935] Methods and conditions for culturing the resulting transfected cells and for recovering the antibody molecule produced are known to those skilled in the art, and may be varied or optimized depending upon the specific expression vector and mammalian host cell employed, based upon the present description.

### Cells

[0936] In another aspect, the application features host cells and vectors containing the nucleic acids described herein. The nucleic acids may be present in a single vector or separate vectors present in the same host cell or separate host cell. The host cell can be a eukaryotic cell, e.g., a mammalian cell, an insect cell, a yeast cell, or a prokaryotic cell, e.g., E. coli. For example, the mammalian cell can be a cultured cell or a cell line. Exemplary mammalian cells include lymphocytic cell lines (e.g., NSO), Chinese hamster ovary cells (CHO), COS cells, oocyte cells, and cells from a transgenic animal, e.g., mammary epithelial cell.

[0937] The invention also provides host cells comprising a nucleic acid encoding an antibody molecule as described herein.

[0938] In one embodiment, the host cells are genetically engineered to comprise nucleic acids encoding the antibody molecule.

[0939] In one embodiment, the host cells are genetically engineered by using an expression cassette. The phrase “expression cassette,” refers to nucleotide sequences, which are capable of affecting expression of a gene in hosts compatible with such sequences. Such cassettes may include a promoter, an open reading frame with or without introns, and a termination signal. Additional factors necessary or helpful in effecting expression may also be used, such as, for example, an inducible promoter.

[0940] The invention also provides host cells comprising the vectors described herein.

[0941] The cell can be, but is not limited to, a eukaryotic cell, a bacterial cell, an insect cell, or a human cell. Suitable eukaryotic cells include, but are not limited to, Vero cells, HeLa cells, COS cells, CHO cells, HEK293 cells, BHK cells and MDCKII cells. Suitable insect cells include, but are not limited to, Sf9 cells.

### Uses and Combination Therapies

[0942] Methods described herein include treating an immune condition or disorder, e.g., an autoimmune disease, in a subject by using a multispecific molecule described herein, e.g., using a pharmaceutical composition described herein. Also provided are methods for reducing or ameliorating a symptom of an autoimmune disorder, e.g., autoimmune disease, in a subject, as well as methods for correcting or decreasing a TCR bias (e.g., re-establishing a balanced TCR repertoire or a TCR repertoire more similar to a person without an autoimmune disease).

[0943] In one embodiment, the immune condition or disorder is chosen from Churg-Strauss syndrome, sarcoidosis, systemic lupus erythematosus (SLE), type 1 diabetes, autoimmune hepatitis (e.g., type 1 or type 2), primary sclerosing cholangitis, primary biliary cirrhosis, multiple sclerosis, Guillain-Barre syndrome and the AMAN (axonal & neuronal neuropathy), chronic inflammatory demyelinating polyneuropathy (CIDP), transverse myelitis, Tolosa-Hunt syndrome (THS), Devic's disease (neuromyelitis optica), paraneoplastic cerebellar degeneration (PCD), Lambert-Eaton syndrome, psoriasis, scleroderma, CREST (calcinosis, Raynaud phenomenon, esophageal dysmotility, sclerodactyly, and telangiectasia) syndrome, dermatitis herpetiformis, dermatomyositis, bullous pemphigoid, cicatricial pemphigoid/benign mucosal pemphigoid, pemphigoid gestationis, rheumatoid arthritis (RA), psoriatic arthritis, relapsing polychondritis, chronic recurrent multifocal osteomyelitis (CRMO), vasculitis, Kawasaki disease, granulomatosis with polyangiitis (GPA), Behcet's disease (vasculitis), Takayasu's arteritis, polyarteritis nodosa, microscopic polyangiitis (MPA), leukocytoclastic vasculitis, Cogan's syndrome, uveitis, peripheral uveitis (Pars planitis), scleritis, autoimmune inner ear disease (AIED), Crohn's, ulcerative colitis (UC), Dressler's syndrome, Rheumatic fever, Evans syndrome, paroxysmal nocturnal hemoglobinuria (PNH), hemolytic anemia, thrombocytopenic purpura (TTP), polymyositis, juvenile myositis (JM), including Juvenile Dermatomyositis (JDM) and Juvenile Polymyositis (JPM), Sjogren's syndrome, ocular cicatricial pemphigoid, or Hashimoto's thyroiditis.

[0944] In some embodiments, the immune condition or disorder, e.g., autoimmune disease, is diabetes (e.g., type 1 diabetes).

[0945] In embodiments, the multispecific molecules (or pharmaceutical composition) are administered in a manner appropriate to the disease to be treated or prevented. The quantity and frequency of administration will be determined by such factors as the condition of the patient, and the type and severity of the patient's disease. Appropriate dosages may be determined by clinical trials. For example, when “an effective amount” or “a therapeutic amount” is indicated, the precise amount of the pharmaceutical composition (or multispecific molecules) to be administered can be determined by a physician with consideration of individual differences in severity/character of immune disorder, extent of infection or metastasis, age, weight, and condition of the subject. In embodiments, the pharmaceutical composition described herein can be administered at a dosage of 10⁴ to 10⁹ cells/kg body weight, e.g., 10⁵ to 10⁶ cells/kg body weight, including all integer values within those ranges. In embodiments, the pharmaceutical composition described herein can be administered multiple times at these dosages. In embodiments, the pharmaceutical composition described herein can be administered using infusion techniques described in immunotherapy (see, e.g., Rosenberg et al., New Eng. J. of Med. 319:1676, 1988).

[0946] In embodiments, the multispecific molecules or pharmaceutical composition is administered to the subject parenterally. In embodiments, the cells are administered to the subject intravenously, subcutaneously, intratumorally, intranodally, intramuscularly, intradermally, or intraperitoneally. In embodiments, the cells are administered, e.g., injected, directly into a tumor or lymph node. In embodiments, the cells are administered as an infusion (e.g., as described in Rosenberg et al., New Eng. J. of Med. 319:1676, 1988) or an intravenous push. In embodiments, the cells are administered as an injectable depot formulation. In embodiments, the subject is a mammal. In embodiments, the subject is a human, monkey, pig, dog, cat, cow, sheep, goat, rabbit, rat, or mouse. In embodiments, the subject is a human. In embodiments, the subject is a pediatric subject, e.g., less than 18 years of age, e.g., less than 17, 16, 15, 14, 13, 12, 11, 10, 9, 8, 7, 6, 5, 4, 3, 2, 1 or less years of age. In embodiments, the subject is an adult, e.g., at least 18 years of age, e.g., at least 19, 20, 21, 22, 23, 24, 25, 25-30, 30-35, 35-40, 40-50, 50-60, 60-70, 70-80, or 80-90 years of age.

### Combination Therapies

[0947] The multispecific or multifunctional molecules disclosed herein can be used in combination with a second therapeutic agent or procedure.

[0948] In embodiments, the multispecific or multifunctional molecule and the second therapeutic agent or procedure are administered/performed after a subject has been diagnosed with an autoimmune disorder. In embodiments, the multispecific or multifunctional molecule and the second therapeutic agent or procedure are administered/performed simultaneously or concurrently. For example, the delivery of one treatment is still occurring when the delivery of the second commences, e.g., there is an overlap in administration of the treatments. In other embodiments, the multispecific or multifunctional molecule and the second therapeutic agent or procedure are administered/performed sequentially. For example, the delivery of one treatment ceases before the delivery of the other treatment begins.

[0949] In embodiments, combination therapy can lead to more effective treatment than monotherapy with either agent alone. In embodiments, the combination of the first and second treatment is more effective (e.g., leads to a greater reduction in symptoms and/or T cells comprising a TCRBV antigen corresponding to a biased TCRBV clonotype cells) than the first or second treatment alone. In embodiments, the combination therapy permits use of a lower dose of the first or the second treatment compared to the dose of the first or second treatment normally required to achieve similar effects when administered as a monotherapy. In embodiments, the combination therapy has a partially additive effect, wholly additive effect, or greater than additive effect.

[0950] In one embodiment, the multispecific or multifunctional molecule is administered in combination with a therapy, e.g., an autoimmune disease therapy known in the art. The administration of the multispecific or multifunctional molecule and the therapy can be sequential (with or without overlap) or simultaneous. Administration of the multispecific or multifunctional molecule can be continuous or intermittent during the course of therapy.

### Immune Checkpoint Inhibitors

[0951] In other embodiments, methods described herein comprise use of an immune checkpoint inhibitor in combination with the multispecific or multifunctional molecule. The methods can be used in a therapeutic protocol in vivo.

[0952] In embodiments, an immune checkpoint inhibitor inhibits a checkpoint molecule. Exemplary checkpoint molecules include but are not limited to CTLA4, PD1, PD-L1, PD-L2, TIM3, LAG3, CD160, 2B4, CD80, CD86, B7-H3 (CD276), B7-H4 (VTCN1), HVEM (TNFRSF14 or CD270), BTLA, KIR, MHC class I, MHC class II, GALS, VISTA, BTLA, TIGIT, LAIR1, and A2aR. See, e.g., Pardoll. Nat. Rev. Cancer 12.4 (2012):252-64, incorporated herein by reference.

[0953] In embodiments, the immune checkpoint inhibitor is a PD-1 inhibitor, e.g., an anti-PD-1 antibody such as Nivolumab, Pembrolizumab or Pidilizumab. Nivolumab (also called MDX-1106, MDX-1106-04, ONO-4538, or BMS-936558) is a fully human IgG4 monoclonal antibody that specifically inhibits PD1. See, e.g., U.S. Pat. No. 8,008,449 and WO2006/121168. Pembrolizumab (also called Lambrolizumab, MK-3475, MK03475, SCH-900475 or KEYTRUDA®; Merck) is a humanized IgG4 monoclonal antibody that binds to PD-1. See, e.g., Hamid, O. et al. (2013) New England Journal of Medicine 369 (2): 134-44, U.S. Pat. No. 8,354,509 and WO2009/114335. Pidilizumab (also called CT-011 or Cure Tech) is a humanized IgG1k monoclonal antibody that binds to PD1. See, e.g., WO2009/101611. In one embodiment, the inhibitor of PD-1 is an antibody molecule having a sequence substantially identical or similar thereto, e.g., a sequence at least 85%, 90%, 95% identical or higher to the sequence of Nivolumab, Pembrolizumab or Pidilizumab. Additional anti-PD1 antibodies, e.g., AMP 514 (Amplimmune), are described, e.g., in U.S. Pat. No. 8,609,089, US 2010028330, and/or US 20120114649.

[0954] In some embodiments, the PD-1 inhibitor is an immunoadhesin, e.g., an immunoadhesin comprising an extracellular/PD-1 binding portion of a PD-1 ligand (e.g., PD-L1 or PD-L2) that is fused to a constant region (e.g., an Fc region of an immunoglobulin). In embodiments, the PD-1 inhibitor is AMP-224 (B7-DCIg, e.g., described in WO2011/066342 and WO2010/027827), a PD-L2 Fc fusion soluble receptor that blocks the interaction between B7-H1 and PD-1.

[0955] In embodiments, the immune checkpoint inhibitor is a PD-L1 inhibitor, e.g., an antibody molecule. In some embodiments, the PD-L1 inhibitor is YW243.55.570, MPDL3280A, MEDI-4736, MSB-0010718C, or MDX-1105. In some embodiments, the anti-PD-L1 antibody is MSB0010718C (also called A09-246-2; Merck Serono), which is a monoclonal antibody that binds to PD-L1. Exemplary humanized anti-PD-L1 antibodies are described, e.g., in WO2013/079174. In one embodiment, the PD-L1 inhibitor is an anti-PD-L1 antibody, e.g., YW243.55.570. The YW243.55.570 antibody is described, e.g., in WO 2010/077634. In one embodiment, the PD-L1 inhibitor is MDX-1105 (also called BMS-936559), which is described, e.g., in WO2007/005874. In one embodiment, the PD-L1 inhibitor is MDPL3280A (Genentech /Roche), which is a human Fc-optimized IgG1 monoclonal antibody against PD-L1. See, e.g., U.S. Pat. No. 7,943,743 and U.S Publication No.: 20120039906. In one embodiment, the inhibitor of PD-L1 is an antibody molecule having a sequence substantially identical or similar thereto, e.g., a sequence at least 85%, 90%, 95% identical or higher to the sequence of YW243.55.S70, MPDL3280A, MEDI-4736, MSB-0010718C, or MDX-1105.

[0956] In embodiments, the immune checkpoint inhibitor is a PD-L2 inhibitor, e.g., AMP-224 (which is a PD-L2 Fc fusion soluble receptor that blocks the interaction between PD1 and B7-H1. See, e.g., WO2010/027827 and WO2011/066342.

[0957] In one embodiment, the immune checkpoint inhibitor is a LAG-3 inhibitor, e.g., an anti LAG-3 antibody molecule. In embodiments, the anti-LAG-3 antibody is BMS-986016 (also called BMS986016; Bristol-Myers Squibb). BMS-986016 and other humanized anti-LAG-3 antibodies are described, e.g., in US 2011/0150892, WO2010/019570, and WO2014/008218.

[0958] In embodiments, the immune checkpoint inhibitor is a TIM-3 inhibitor, e.g., anti-TIM3 antibody molecule, e.g., described in U.S. Pat. No. 8,552,156, WO 2011/155607, EP 2581113 and U.S Publication No.: 2014/044728.

[0959] In embodiments, the immune checkpoint inhibitor is a CTLA-4 inhibitor, e.g., anti-CTLA-4 antibody molecule. Exemplary anti-CTLA4 antibodies include Tremelimumab (IgG2 monoclonal antibody from Pfizer, formerly known as ticilimumab, CP-675,206); and Ipilimumab (also called MDX-010, CAS No. 477202-00-9). Other exemplary anti-CTLA-4 antibodies are described, e.g., in U.S. Pat. No. 5,811,097.

### INCORPORATION BY REFERENCE

[0960] All publications and patents mentioned herein are hereby incorporated by reference in their entirety as if each individual publication or patent was specifically and individually indicated to be incorporated by reference.

### EXAMPLES

### Example 1: Immunization of Armenian Hamster to Generate Anti-NKp30 Antibodies

[0961] Briefly, armenian hamster were immunized with the extracellular domain of human NKp30 protein in complete Freund's adjuvant and boosted twice on day 14 and day 28 with NKp30 in incomplete Freund's adjuvant (IFA). On day 56 one more boost in IFA was given and the animals harvested three days later. Spleens were collected and fused with P3X63Ag8.653 murine myeloma cell line. 0.9×10\hat{ }5 cells/well in 125 ul were seated in 96 well plate and feed with 125 μl of I-20+2ME HAT (IMDM (4 g/L, glucose) supplemented with 20% fetal bovine serum, 4 mM L-glutamine, 1 mM sodium pyruvate, 50 U penicillin, 50 μg streptomycin and 50 μM 2-ME in the absence or presence of HAT or HT for selection, and Hybridoma Cloning Factor (1% final) on days 7, 11 and thereafter as needed. At approximately 2 weeks after fusion (cells are about 50% confluent) supernatant was collected and assayed for binding.

### Example 2: Hybridoma Screen for NKp30 mAbs

[0962] Expi293 cells were transfected with BG160 (hNKp30 cell antigen) 18 hours prior to screening. The day of screening, transfected cells were diluted to 0.05×10\hat{ }6/mL and anti-Armenian hamster Fc Alexa Fluor 488 added to a final concentration of 0.4 ug/mL. 50 (2,500 cells) of this mixture was added to each well of a 384 well plate. The same density of untransfected 293 cells with secondary were used as a negative control. 5 uL of hybridoma supernatant was added to the cell mixture and the plate incubated for 1 hour at 37° C. The plates were then imaged on Mirrorball. Positive clones were identified and subcloned by serial dilution to obtain clonal selected hybridoma, After reconfirmation using the same protocols the hybridoma cells were harvested and the corresponding heavy and light chain sequences recovered. The DNA was subcloned into pcDNA3.4 for subsequent expression of the corresponding antibodies and further validation.

### Example 3: Binding of NKp30 Antibodies to NK92 Cells

[0963] NK-92 cells were washed with PBS containing 0.5% BSA and 0.1% sodium azide (staining buffer) and added to 96-well V-bottom plates with 200,000 cells/Well. Hamster NKp30 antibodies were added to the cells in 2.0 fold serial dilutions and incubated for 1 hour at room temperature. The plates were washed twice with staining buffer. The secondary antibody against hamster Fc conjugated to AF647 (Jackson, 127-605-160) was added at 1:100 dilution (1.4 mg/ml stock) and incubated with the cells for 30 minutes at 4° C.′ followed by washing with staining buffer. Cells were subsequently were fixed for 10 minutes with 4% paraformaldehyde at room temperature. The plates were read on CytoFLEX LS (Beckman Coulter). Data was calculated as the percent-AF747 positive population (FIG. 4).

### Example 4: Bioassay to Measure Activity of NKp30 Antibodies Using NK92 Cell Line

[0964] NKp30 antibodies were three-fold serially diluted in PBS and incubated at 2-8° C. overnight in flat bottom 96 well plates. Plates were washed twice in PBS and 40,000 NK-92 cells were added in growth medium containing IL-2. Plates were incubated at 37° C., 5% CO2, humidified incubator for 16-24 hours before supernatants were collected. IFNγ levels in supernatants was measured following MSD assay instructions (FIG. 5). Supernatant collected from cells incubated with hamster isotype IgG was used as negative control and supernatants from cells incubated with NKp30 monoclonal antibody (R&D, clone 210847) was utilized as a positive control. Data were generated using hamster anti-NKp30 mABs.

### Example 5: Generation and Characterization of Humanized Anti-NKp30 Antibodies

[0965] A series of hamster anti-NKp30 antibodies were selected. These antibodies were shown to bind to human NKp30 and cynomolgus NKp30 and induce IFNγ production from NK-90 cells (data not shown). The VH and VL sequences of exemplary hamster anti-NKp30 antibodies 15E1, 9G1, 15H6, 9D9, 3A12, and 12D10 are disclosed in Table 9. The VH and VL sequences of exemplary humanized anti-NKp30 antibodies based on 15E1, 9G1, and 15H6 are also disclosed in Table 9. The Kabat CDRs of these antibodies are disclosed in Table 18 and Table 8.

[0966] Two humanized constructs based on 15E1 were selected. The first construct BJM0407 is a Fab comprising a heavy chain variable region comprising the amino acid sequence of SEQ ID NO: 7302 and a lambda light chain variable region comprising the amino acid sequence of SEQ ID NO: 7305. Its corresponding scFv construct BJM0859 comprises the amino acid sequence of SEQ ID NO: 7310. The second construct BJM0411 is a Fab comprising a heavy chain variable region comprising the amino acid sequence of SEQ ID NO: 7302 and a kappa light chain variable region comprising the amino acid sequence of SEQ ID NO: 7309. Its corresponding scFv construct BJM0860 comprises the amino acid sequence of SEQ ID NO: 7311. BJM0407 and BJM0411 showed comparable biophysical characteristics, e.g., binding affinity to NKp30 and thermal stability. The scFv constructs BJM0859 and BJM0860 also showed comparable biophysical properties.

### EQUIVALENTS

[0967] Those skilled in the art will recognize, or be able to ascertain using no more than routine experimentation, many equivalents to the specific embodiments of the invention described herein. Such equivalents are intended to be encompassed by the following claims.

The application's sequence listing, which the Patent Office published only in electronic form, follows.

SEQUENCE LISTING (7385 sequences)

SEQ ID NO: 1 - protein, 119 aa, Artificial Sequence
  source: /note="Description of Artificial Sequence: Synthetic polypeptide"
QVQLQQSGPELVKPGTSVKISCKASGYSFTTYYIHWVKQRPGQGLEWIGWFFPGSGNIKYNEKFKGKATLTADTSSSTAYMQLSSLTSEESAVYFCAGSYYSYDVLDYWGHGTTLTVSS

SEQ ID NO: 2 - protein, 107 aa, Artificial Sequence
  source: /note="Description of Artificial Sequence: Synthetic polypeptide"
DILMTQSQKFMSTSLGDRVSVSCKASQNVGINVVWHQQKPGQSPKALIYSSSHRYSGVPDRFTGSGSGTDFTLTINNVQSEDLAEYFCQQFKSYPLTFGAGTKLELK

SEQ ID NO: 3 - protein, 10 aa, Artificial Sequence
  source: /note="Description of Artificial Sequence: Synthetic peptide"
GYSFTTYYIH

SEQ ID NO: 4 - protein, 17 aa, Artificial Sequence
  source: /note="Description of Artificial Sequence: Synthetic peptide"
WFFPGSGNIKYNEKFKG

SEQ ID NO: 5 - protein, 10 aa, Artificial Sequence
  source: /note="Description of Artificial Sequence: Synthetic peptide"
SYYSYDVLDY

SEQ ID NO: 6 - protein, 11 aa, Artificial Sequence
  source: /note="Description of Artificial Sequence: Synthetic peptide"
KASQNVGINVV

SEQ ID NO: 7 - protein, 7 aa, Artificial Sequence
  source: /note="Description of Artificial Sequence: Synthetic peptide"
SSSHRYS

SEQ ID NO: 8 - protein, 9 aa, Artificial Sequence
  source: /note="Description of Artificial Sequence: Synthetic peptide"
QQFKSYPLT

SEQ ID NO: 9 - protein, 119 aa, Artificial Sequence
  source: /note="Description of Artificial Sequence: Synthetic polypeptide"
QVQLVQSGAEVKKPGSSVKVSCKASGYSFTTYYIHWVRQAPGQGLEWMGWFFPGSGNIKYNEKFKGRVTITADTSTSTAYMELSSLRSEDTAVYYCAGSYYSYDVLDYWGQGTTVTVSS

SEQ ID NO: 10 - protein, 107 aa, Artificial Sequence
  source: /note="Description of Artificial Sequence: Synthetic polypeptide"
DIQMTQSPSFLSASVGDRVTITCKASQNVGINVVWHQQKPGKAPKALIYSSSHRYSGVPSRFSGSGSGTEFTLTISSLQPEDFATYFCQQFKSYPLTFGQGTKLEIK

SEQ ID NO: 11 - protein, 107 aa, Artificial Sequence
  source: /note="Description of Artificial Sequence: Synthetic polypeptide"
DIQMTQSPSSLSASVGDRVTITCKASQNVGINVVWHQQKPGKVPKALIYSSSHRYSGVPSRFSGSGSGTDFTLTISSLQPEDVATYFCQQFKSYPLTFGQGTKLEIK

SEQ ID NO: 12 - DNA, 357 bp, Artificial Sequence
  source: /note="Description of Artificial Sequence: Synthetic polynucleotide"
caggtgcagctggttcagtctggcgccgaagtgaagaaacctggctcctccgtgaaggtgtcctgcaaggcttccggctactccttcaccacctactacatccactgggtccgacaggcccctggacaaggattggaatggatgggctggttcttccccggctccggcaacatcaagtacaacgagaagttcaagggccgcgtgaccatcaccgccgacacctctacctctaccgcctacatggaactgtccagcctgagatctgaggacaccgccgtgtactactgcgccggctcctactactcttacgacgtgctggattactggggccagggcaccacagtgacagtgtcctct

SEQ ID NO: 13 - DNA, 321 bp, Artificial Sequence
  source: /note="Description of Artificial Sequence: Synthetic polynucleotide"
gacatccagatgacccagtctccatccttcctgtccgcctctgtgggcgacagagtgaccatcacatgcaaggcctctcagaacgtgggcatcaacgtcgtgtggcaccagcagaagcctggcaaggctcctaaggctctgatctactcctccagccaccggtactctggcgtgccctctagattttccggctctggctctggcaccgagtttaccctgacaatctccagcctgcagcctgaggacttcgccacctacttttgccagcagttcaagagctaccctctgacctttggccagggcaccaagctggaaatcaag

SEQ ID NO: 14 - DNA, 321 bp, Artificial Sequence
  source: /note="Description of Artificial Sequence: Synthetic polynucleotide"
gacatccagatgacccagtctccatcctctctgtccgcctctgtgggcgacagagtgaccatcacatgcaaggcctctcagaacgtgggcatcaacgtcgtgtggcaccagcagaaacctggcaaggtgcccaaggctctgatctactcctccagccacagatactccggcgtgccctctagattctccggctctggctctggcaccgactttaccctgacaatctccagcctgcagcctgaggacgtggccacctacttttgccagcagttcaagagctaccctctgacctttggccagggcaccaagctggaaatcaag

SEQ ID NO: 15 - protein, 117 aa, Artificial Sequence
  source: /note="Description of Artificial Sequence: Synthetic polypeptide"
DVQLVESGGGLVQPGGSRKLSCAASGFTFSNFGMHWVRQAPDKGLEWVAYISSGSSTIYYADTLKGRFTISRDNPKNTLFLQMTSLRSEDTAMYYCARRGEGAMDYWGQGTSVTVSS

SEQ ID NO: 16 - protein, 106 aa, Artificial Sequence
  source: /note="Description of Artificial Sequence: Synthetic polypeptide"
ENVLTQSPAIMSASLGEKVTMSCRASSSVNYIYWYQQKSDASPKLWIYYTSNLAPGVPTRFSGSGSGNSYSLTISSMEGEDAATYYCQQFTSSPFTFGSGTKLEIK

SEQ ID NO: 17 - protein, 10 aa, Artificial Sequence
  source: /note="Description of Artificial Sequence: Synthetic peptide"
GFTFSNFGMH

SEQ ID NO: 18 - protein, 17 aa, Artificial Sequence
  source: /note="Description of Artificial Sequence: Synthetic peptide"
YISSGSSTIYYADTLKG

SEQ ID NO: 19 - protein, 8 aa, Artificial Sequence
  source: /note="Description of Artificial Sequence: Synthetic peptide"
RGEGAMDY

SEQ ID NO: 20 - protein, 10 aa, Artificial Sequence
  source: /note="Description of Artificial Sequence: Synthetic peptide"
RASSSVNYIY

SEQ ID NO: 21 - protein, 7 aa, Artificial Sequence
  source: /note="Description of Artificial Sequence: Synthetic peptide"
YTSNLAP

SEQ ID NO: 22 - protein, 9 aa, Artificial Sequence
  source: /note="Description of Artificial Sequence: Synthetic peptide"
QQFTSSPFT

SEQ ID NO: 23 - protein, 117 aa, Artificial Sequence
  source: /note="Description of Artificial Sequence: Synthetic polypeptide"
EVQLVESGGGLVQPGGSLRLSCAASGFTFSNFGMHWVRQAPGKGLEWVSYISSGSSTIYYADTLKGRFTISRDNAKNSLYLQMNSLRAEDTAVYYCARRGEGAMDYWGQGTTVTVSS

SEQ ID NO: 24 - protein, 117 aa, Artificial Sequence
  source: /note="Description of Artificial Sequence: Synthetic polypeptide"
EVQLVESGGGLVQPGGSLRLSCAASGFTFSNFGMHWVRQAPGKGLEWVSYISSGSSTIYYADTLKGRFTISRDNSKNTLYLQMNSLRAEDTAVYYCARRGEGAMDYWGQGTTVTVSS

SEQ ID NO: 25 - protein, 117 aa, Artificial Sequence
  source: /note="Description of Artificial Sequence: Synthetic polypeptide"
QVQLVESGGGVVQPGRSLRLSCAASGFTFSNFGMHWVRQAPGKGLEWVAYISSGSSTIYYADTLKGRFTISRDNSKNTLYLQMNSLRAEDTAVYYCARRGEGAMDYWGQGTTVTVSS

SEQ ID NO: 26 - protein, 106 aa, Artificial Sequence
  source: /note="Description of Artificial Sequence: Synthetic polypeptide"
DNQLTQSPSFLSASVGDRVTITCRASSSVNYIYWYQQKPGKAPKLLIYYTSNLAPGVPSRFSGSGSGNEYTLTISSLQPEDFATYYCQQFTSSPFTFGQGTKLEIK

SEQ ID NO: 27 - protein, 106 aa, Artificial Sequence
  source: /note="Description of Artificial Sequence: Synthetic polypeptide"
DNQLTQSPSSLSASVGDRVTITCRASSSVNYIYWYQQKPGKAPKLLIYYTSNLAPGVPSRFSGSGSGNDYTLTISSLQPEDFATYYCQQFTSSPFTFGQGTKLEIK

SEQ ID NO: 28 - protein, 106 aa, Artificial Sequence
  source: /note="Description of Artificial Sequence: Synthetic polypeptide"
ENVLTQSPATLSVSPGERATLSCRASSSVNYIYWYQQKPGQAPRLLIYYTSNLAPGIPARFSGSGSGNEYTLTISSLQSEDFAVYYCQQFTSSPFTFGQGTKLEIK

SEQ ID NO: 29 - protein, 105 aa, Artificial Sequence
  source: /note="Description of Artificial Sequence: Synthetic polypeptide"
QNVLTQPPSASGTPGQRVTISCRASSSVNYIYWYQQLPGTAPKLLIYYTSNLAPGVPDRFSGSGSGNSYSLAISGLRSEDEADYYCQQFTSSPFTFGTGTKVTVL

SEQ ID NO: 30 - protein, 105 aa, Artificial Sequence
  source: /note="Description of Artificial Sequence: Synthetic polypeptide"
SNELTQPPSVSVSPGQTARITCRASSSVNYIYWYQQKSGQAPVLVIYYTSNLAPGIPERFSGSGSGNMYTLTISGAQVEDEADYYCQQFTSSPFTFGTGTKVTVL

SEQ ID NO: 31 - DNA, 351 bp, Artificial Sequence
  source: /note="Description of Artificial Sequence: Synthetic polynucleotide"
gaggtgcagctggttgaatctggcggaggattggttcagcctggcggctctctgagactgtcttgtgccgcttctggcttcaccttctccaacttcggcatgcactgggtccgacaggcccctggaaaaggactggaatgggtgtcctacatctcctccggctcctccaccatctactacgctgacaccctgaagggcagattcaccatctctcgggacaacgccaagaactccctgtacctgcagatgaacagcctgagagccgaggacaccgccgtgtactactgtgctagaagaggcgagggcgccatggattattggggccagggaaccacagtgaccgtgtctagc

SEQ ID NO: 32 - DNA, 351 bp, Artificial Sequence
  source: /note="Description of Artificial Sequence: Synthetic polynucleotide"
gaggtgcagctggttgaatctggcggaggattggttcagcctggcggctctctgagactgtcttgtgccgcttctggcttcaccttctccaacttcggcatgcactgggtccgacaggcccctggaaaaggactggaatgggtgtcctacatctcctccggctcctccaccatctactacgctgacaccctgaagggcagattcaccatcagccgggacaactccaagaacaccctgtacctgcagatgaactccctgagagccgaggacaccgccgtgtactactgtgctagaagaggcgagggcgccatggattattggggccagggaaccacagtgaccgtgtctagc

SEQ ID NO: 33 - DNA, 351 bp, Artificial Sequence
  source: /note="Description of Artificial Sequence: Synthetic polynucleotide"
caggtgcagctggtggaatctggtggcggagttgtgcagcctggcagatccctgagactgtcttgtgccgcctctggcttcaccttctccaacttcggcatgcactgggtccgacaggcccctggaaaaggattggagtgggtcgcctacatctcctccggctcctccaccatctactacgctgacaccctgaagggcagattcaccatcagccgggacaactccaagaacaccctgtacctgcagatgaactccctgagagccgaggacaccgccgtgtactactgtgctagaagaggcgagggcgccatggattattggggccagggaaccacagtgaccgtgtctagc

SEQ ID NO: 34 - DNA, 318 bp, Artificial Sequence
  source: /note="Description of Artificial Sequence: Synthetic polynucleotide"
gataaccagctgacccagtctcctagcttcctgtctgcctctgtgggcgacagagtgacaattacctgccgggcctcctcctccgtgaactacatctactggtatcagcagaagcccggcaaggcccctaagctgctgatctactacacctccaatctggcccctggcgtgccctctagattttccggatctggctccggcaacgagtataccctgacaatctccagcctgcagcctgaggacttcgccacctactactgccagcagttcacctcctctccattcacctttggccagggcaccaagctggaaatcaaa

SEQ ID NO: 35 - DNA, 317 bp, Artificial Sequence
  source: /note="Description of Artificial Sequence: Synthetic polynucleotide"
ataaccagctgacccagtctccttccagcctgtctgcttctgtgggcgacagagtgacaattacctgccgggcctcctcctccgtgaactacatctactggtatcagcagaagcccggcaaggcccctaagctgctgatctactacacctccaatctggcccctggcgtgccctctagattttccggatctggctccggcaacgactataccctgacaatctccagcctgcagcctgaggacttcgccacctactactgccagcagttcacctcctctccattcacctttggccagggcaccaagctggaaatcaaa

SEQ ID NO: 36 - DNA, 318 bp, Artificial Sequence
  source: /note="Description of Artificial Sequence: Synthetic polynucleotide"
gagaatgtgctgacccagtctcctgccacactgtctgttagccctggcgagagagctaccctgagctgcagagcctcttcctccgtgaactacatctactggtatcagcagaagcccggccaggctcctagactgctgatctactacacctccaatctggcccctggcatccctgccagattttccggatctggctccggcaacgagtataccctgaccatctccagcctgcagtccgaggactttgctgtgtactattgccagcagttcacaagcagccctttcacctttggccagggcaccaagctggaaatcaaa

SEQ ID NO: 37 - DNA, 315 bp, Artificial Sequence
  source: /note="Description of Artificial Sequence: Synthetic polynucleotide"
cagaatgtgctgacccaacctccttccgcctctggcacacctggacagagagtgacaatctcctgccgggcctcctcctccgtgaactacatctactggtatcagcagctgcccggcaccgctcctaaactgctgatctactacacctccaatctggcccctggcgtgcccgatagattttccggatctggctccggcaactcctacagcctggctatctctggcctgagatctgaggacgaggccgactactactgccagcagttcacctcctctccattcacctttggcaccggcaccaaagtgacagttctt

SEQ ID NO: 38 - DNA, 315 bp, Artificial Sequence
  source: /note="Description of Artificial Sequence: Synthetic polynucleotide"
tctaatgagctgacccagcctccttccgtgtccgtgtctcctggacagaccgccagaattacctgccgggcctcctcctccgtgaactacatctactggtatcagcagaagtccggccaggctcctgtgctcgtgatctactacacctccaatctggcccctggcatccctgagagattctccggatctggctccggcaacatgtacaccctgaccatctctggcgcccaggtggaagatgaggccgactactactgccagcagttcacctcctctccattcacctttggcaccggcaccaaagtgacagttctt

SEQ ID NO: 39 - protein, 107 aa, Homo sapiens [sequence omitted]

SEQ ID NO: 40 - protein, 326 aa, Artificial Sequence
  source: /note="Description of Artificial Sequence: Synthetic polypeptide"
ASTKGPSVFPLAPCSRSTSESTAALGCLVKDYFPEPVTVSWNSGALTSGVHTFPAVLQSSGLYSLSSVVTVPSSSLGTKTYTCNVDHKPSNTKVDKRVESKYGPPCPPCPAPEFLGGPSVFLFPPKPKDTLMISRTPEVTCVVVDVSQEDPEVQFNWYVDGVEVHNAKTKPREEQFNSTYRVVSVLTVLHQDWLNGKEYKCKVSNKGLPSSIEKTISKAKGQPREPQVYTLPPSQEEMTKNQVSLTCLVKGFYPSDIAVEWESNGQPENNYKTTPPVLDSDGSFFLYSRLTVDKSRWQEGNVFSCSVMHEALHNHYTQKSLSLSLG

SEQ ID NO: 41 - protein, 330 aa, Homo sapiens
ASTKGPSVFPLAPSSKSTSGGTAALGCLVKDYFPEPVTVSWNSGALTSGVHTFPAVLQSSGLYSLSSVVTVPSSSLGTQTYICNVNHKPSNTKVDKRVEPKSCDKTHTCPPCPAPELLGGPSVFLFPPKPKDTLMISRTPEVTCVVVDVSHEDPEVKFNWYVDGVEVHNAKTKPREEQYNSTYRVVSVLTVLHQDWLNGKEYKCKVSNKALPAPIEKTISKAKGQPREPQVYTLPPSREEMTKNQVSLTCLVKGFYPSDIAVEWESNGQPENNYKTTPPVLDSDGSFFLYSKLTVDKSRWQQGNVFSCSVMHEALHNHYTQKSLSLSPGK

SEQ ID NO: 42 - protein, 330 aa, Artificial Sequence
  source: /note="Description of Artificial Sequence: Synthetic polypeptide"
ASTKGPSVFPLAPSSKSTSGGTAALGCLVKDYFPEPVTVSWNSGALTSGVHTFPAVLQSSGLYSLSSVVTVPSSSLGTQTYICNVNHKPSNTKVDKRVEPKSCDKTHTCPPCPAPELLGGPSVFLFPPKPKDTLMISRTPEVTCVVVDVSHEDPEVKFNWYVDGVEVHNAKTKPREEQYASTYRVVSVLTVLHQDWLNGKEYKCKVSNKALPAPIEKTISKAKGQPREPQVYTLPPSREEMTKNQVSLTCLVKGFYPSDIAVEWESNGQPENNYKTTPPVLDSDGSFFLYSKLTVDKSRWQQGNVFSCSVMHEALHNHYTQKSLSLSPGK

SEQ ID NO: 43 - DNA, 344 bp, Artificial Sequence
  source: /note="Description of Artificial Sequence: Synthetic polynucleotide"
atgagcatcggcctcctgtgctgtgcagccttgtctctcctgtgggcaggtccagtgaatgctggtgtcactcagaccccaaaattccaggtcctgaagacaggacagagcatgacactgcagtgtgcccaggatatgaaccatgaatacatgtcctggtatcgacaagacccaggcatggggctgaggctgattcattactcagttggtgctggtatcactgaccaaggagaagtccccaatggctacaatgtctccagatcaaccacagaggatttcccgctcaggctgctgtcggctgctccctcccagacatctgtgtacttctgtgccagcagttactc

SEQ ID NO: 44 - protein, 114 aa, Artificial Sequence
  source: /note="Description of Artificial Sequence: Synthetic polypeptide"
MSIGLLCCAALSLLWAGPVNAGVTQTPKFQVLKTGQSMTLQCAQDMNHEYMSWYRQDPGMGLRLIHYSVGAGITDQGEVPNGYNVSRSTTEDFPLRLLSAAPSQTSVYFCASSY

SEQ ID NO: 45 - protein, 5 aa, Artificial Sequence
  source: /note="Description of Artificial Sequence: Synthetic peptide"
TYYIH

SEQ ID NO: 46 - protein, 17 aa, Artificial Sequence
  source: /note="Description of Artificial Sequence: Synthetic peptide"
WFFPGSGNIKYNEKFKG

SEQ ID NO: 47 - protein, 10 aa, Artificial Sequence
  source: /note="Description of Artificial Sequence: Synthetic peptide"
SYYSYDVLDY

SEQ ID NO: 48 - protein, 7 aa, Artificial Sequence
  source: /note="Description of Artificial Sequence: Synthetic peptide"
GYSFTTY

SEQ ID NO: 49 - protein, 6 aa, Artificial Sequence
  source: /note="Description of Artificial Sequence: Synthetic peptide"
FPGSGN

SEQ ID NO: 50 - protein, 10 aa, Artificial Sequence
  source: /note="Description of Artificial Sequence: Synthetic peptide"
SYYSYDVLDY

SEQ ID NO: 51 - protein, 11 aa, Artificial Sequence
  source: /note="Description of Artificial Sequence: Synthetic peptide"
KASQNVGINVV

SEQ ID NO: 52 - protein, 7 aa, Artificial Sequence
  source: /note="Description of Artificial Sequence: Synthetic peptide"
SSSHRYS

SEQ ID NO: 53 - protein, 9 aa, Artificial Sequence
  source: /note="Description of Artificial Sequence: Synthetic peptide"
QQFKSYPLT

SEQ ID NO: 54 - protein, 11 aa, Artificial Sequence
  source: /note="Description of Artificial Sequence: Synthetic peptide"
KASQNVGINVV

SEQ ID NO: 55 - protein, 7 aa, Artificial Sequence
  source: /note="Description of Artificial Sequence: Synthetic peptide"
SSSHRYS

SEQ ID NO: 56 - protein, 9 aa, Artificial Sequence
  source: /note="Description of Artificial Sequence: Synthetic peptide"
QQFKSYPLT

SEQ ID NO: 57 - protein, 5 aa, Artificial Sequence
  source: /note="Description of Artificial Sequence: Synthetic peptide"
NFGMH

SEQ ID NO: 58 - protein, 17 aa, Artificial Sequence
  source: /note="Description of Artificial Sequence: Synthetic peptide"
YISSGSSTIYYADTLKG

SEQ ID NO: 59 - protein, 8 aa, Artificial Sequence
  source: /note="Description of Artificial Sequence: Synthetic peptide"
RGEGAMDY

SEQ ID NO: 60 - protein, 7 aa, Artificial Sequence
  source: /note="Description of Artificial Sequence: Synthetic peptide"
GFTFSNF

SEQ ID NO: 61 - protein, 6 aa, Artificial Sequence
  source: /note="Description of Artificial Sequence: Synthetic peptide"
SSGSST

SEQ ID NO: 62 - protein, 8 aa, Artificial Sequence
  source: /note="Description of Artificial Sequence: Synthetic peptide"
RGEGAMDY

SEQ ID NO: 63 - protein, 10 aa, Artificial Sequence
  source: /note="Description of Artificial Sequence: Synthetic peptide"
RASSSVNYIY

SEQ ID NO: 64 - protein, 7 aa, Artificial Sequence
  source: /note="Description of Artificial Sequence: Synthetic peptide"
YTSNLAP

SEQ ID NO: 65 - protein, 9 aa, Artificial Sequence
  source: /note="Description of Artificial Sequence: Synthetic peptide"
QQFTSSPFT

SEQ ID NO: 66 - protein, 10 aa, Artificial Sequence
  source: /note="Description of Artificial Sequence: Synthetic peptide"
RASSSVNYIY

SEQ ID NO: 67 - protein, 7 aa, Artificial Sequence
  source: /note="Description of Artificial Sequence: Synthetic peptide"
YTSNLAP

SEQ ID NO: 68 - protein, 9 aa, Artificial Sequence
  source: /note="Description of Artificial Sequence: Synthetic peptide"
QQFTSSPFT

SEQ ID NO: 69 - protein, 592 aa, Artificial Sequence
  source: /note="Description of Artificial Sequence: Synthetic polypeptide"
METDTLLLWVLLLWVPGSTGQVQLVQSGAEVKKPGSSVKVSCKASGYSFTTYYIHWVRQAPGQGLEWMGWFFPGSGNIKYNEKFKGRVTITADTSTSTAYMELSSLRSEDTAVYYCAGSYYSYDVLDYWGQGTTVTVSSGSASAPTLFPLVSCENSPSDTSSVAVGCLAQDFLPDSITFSWKYKNNSDISSTRGFPSVLRGGKYAATSQVLLPSKDVMQGTDEHVVCKVQHPNGNKEKNVPLPVIAELPPKVSVFVPPRDGFFGNPRKSKLICQATGFSPRQIQVSWLREGKQVGSGVTTDQVQAEAKESGPTTYKVTSTLTIKESDWLGQSMFTCRVDHRGLTFQQNASSMCVPDQDTAIRVFAIPPSFASIFLTKSTKLTCLVTDLTTYDSVTISWTRQNGEAVKTHTNISESHPNATFSAVGEASICEDDWNSGERFTCTVTHTDLASSLKQTISRPKGVALHRPDVYLLPPAREQLNLRESATITCLVTGFSPADVFVQWMQRGQPLSPEKYVTSAPMPEPQAPGRYFAHSILTVSEEEWNTGETYTCVVAHEALPNRVTERTVDKSTGKPTLYNVSLVMSDTAGTCY

SEQ ID NO: 70 - protein, 492 aa, Artificial Sequence
  source: /note="Description of Artificial Sequence: Synthetic polypeptide"
METDTLLLWVLLLWVPGSTGQVQLVQSGAEVKKPGSSVKVSCKASGYSFTTYYIHWVRQAPGQGLEWMGWFFPGSGNIKYNEKFKGRVTITADTSTSTAYMELSSLRSEDTAVYYCAGSYYSYDVLDYWGQGTTVTVSSASPTSPKVFPLSLCSTQPDGNVVIACLVQGFFPQEPLSVTWSESGQGVTARNFPPSQDASGDLYTTSSQLTLPATQCLAGKSVTCHVKHYTNPSQDVTVPCPVPSTPPTPSPSTPPTPSPSCCHPRLSLHRPALEDLLLGSEANLTCTLTGLRDASGVTFTWTPSSGKSAVQGPPERDLCGCYSVSSVLPGCAEPWNHGKTFTCTAAYPESKTPLTATLSKSGNTFRPEVHLLPPPSEELALNELVTLTCLARGFSPKDVLVRWLQGSQELPREKYLTWASRQEPSQGTTTFAVTSILRVAAEDWKKGDTFSCMVGHEALPLAFTQKTIDRLAGKPTHVNVSVVMAEVDGTCY

SEQ ID NO: 71 - protein, 479 aa, Artificial Sequence
  source: /note="Description of Artificial Sequence: Synthetic polypeptide"
METDTLLLWVLLLWVPGSTGQVQLVQSGAEVKKPGSSVKVSCKASGYSFTTYYIHWVRQAPGQGLEWMGWFFPGSGNIKYNEKFKGRVTITADTSTSTAYMELSSLRSEDTAVYYCAGSYYSYDVLDYWGQGTTVTVSSASPTSPKVFPLSLDSTPQDGNVVVACLVQGFFPQEPLSVTWSESGQNVTARNFPPSQDASGDLYTTSSQLTLPATQCPDGKSVTCHVKHYTNSSQDVTVPCRVPPPPPCCHPRLSLHRPALEDLLLGSEANLTCTLTGLRDASGATFTWTPSSGKSAVQGPPERDLCGCYSVSSVLPGCAQPWNHGETFTCTAAHPELKTPLTANITKSGNTFRPEVHLLPPPSEELALNELVTLTCLARGFSPKDVLVRWLQGSQELPREKYLTWASRQEPSQGTTTYAVTSILRVAAEDWKKGETFSCMVGHEALPLAFTQKTIDRMAGKPTHINVSVVMAEADGTCY

SEQ ID NO: 72 - protein, 234 aa, Artificial Sequence
  source: /note="Description of Artificial Sequence: Synthetic polypeptide"
METDTLLLWVLLLWVPGSTGDIQMTQSPSFLSASVGDRVTITCKASQNVGINVVWHQQKPGKAPKALIYSSSHRYSGVPSRFSGSGSGTEFTLTISSLQPEDFATYFCQQFKSYPLTFGQGTKLEIKRTVAAPSVFIFPPSDEQLKSGTASVVCLLNNFYPREAKVQWKVDNALQSGNSQESVTEQDSKDSTYSLSSTLTLSKADYEKHKVYACEVTHQGLSSPVTKSFNRGEC

SEQ ID NO: 73 - protein, 453 aa, Artificial Sequence
  source: /note="Description of Artificial Sequence: Synthetic polypeptide"
GSASAPTLFPLVSCENSPSDTSSVAVGCLAQDFLPDSITFSWKYKNNSDISSTRGFPSVLRGGKYAATSQVLLPSKDVMQGTDEHVVCKVQHPNGNKEKNVPLPVIAELPPKVSVFVPPRDGFFGNPRKSKLICQATGFSPRQIQVSWLREGKQVGSGVTTDQVQAEAKESGPTTYKVTSTLTIKESDWLGQSMFTCRVDHRGLTFQQNASSMCVPDQDTAIRVFAIPPSFASIFLTKSTKLTCLVTDLTTYDSVTISWTRQNGEAVKTHTNISESHPNATFSAVGEASICEDDWNSGERFTCTVTHTDLASSLKQTISRPKGVALHRPDVYLLPPAREQLNLRESATITCLVTGFSPADVFVQWMQRGQPLSPEKYVTSAPMPEPQAPGRYFAHSILTVSEEEWNTGETYTCVVAHEALPNRVTERTVDKSTGKPTLYNVSLVMSDTAGTCY

SEQ ID NO: 74 - protein, 353 aa, Artificial Sequence
  source: /note="Description of Artificial Sequence: Synthetic polypeptide"
ASPTSPKVFPLSLCSTQPDGNVVIACLVQGFFPQEPLSVTWSESGQGVTARNFPPSQDASGDLYTTSSQLTLPATQCLAGKSVTCHVKHYTNPSQDVTVPCPVPSTPPTPSPSTPPTPSPSCCHPRLSLHRPALEDLLLGSEANLTCTLTGLRDASGVTFTWTPSSGKSAVQGPPERDLCGCYSVSSVLPGCAEPWNHGKTFTCTAAYPESKTPLTATLSKSGNTFRPEVHLLPPPSEELALNELVTLTCLARGFSPKDVLVRWLQGSQELPREKYLTWASRQEPSQGTTTFAVTSILRVAAEDWKKGDTFSCMVGHEALPLAFTQKTIDRLAGKPTHVNVSVVMAEVDGTCY

SEQ ID NO: 75 - protein, 340 aa, Artificial Sequence
  source: /note="Description of Artificial Sequence: Synthetic polypeptide"
ASPTSPKVFPLSLDSTPQDGNVVVACLVQGFFPQEPLSVTWSESGQNVTARNFPPSQDASGDLYTTSSQLTLPATQCPDGKSVTCHVKHYTNSSQDVTVPCRVPPPPPCCHPRLSLHRPALEDLLLGSEANLTCTLTGLRDASGATFTWTPSSGKSAVQGPPERDLCGCYSVSSVLPGCAQPWNHGETFTCTAAHPELKTPLTANITKSGNTFRPEVHLLPPPSEELALNELVTLTCLARGFSPKDVLVRWLQGSQELPREKYLTWASRQEPSQGTTTYAVTSILRVAAEDWKKGETFSCMVGHEALPLAFTQKTIDRMAGKPTHINVSVVMAEADGTCY

SEQ ID NO: 76 - protein, 159 aa, Homo sapiens
MKNHLLFWGVLAVFIKAVHVKAQEDERIVLVDNKCKCARITSRIIRSSEDPNEDIVERNIRIIVPLNNRENISDPTSPLRTRFVYHLSDLCKKCDPTEVELDNQIVTATQSNICDEDSATETCYTYDRNKCYTAVVPLVYGGETKMVETALTPDACYPD

SEQ ID NO: 77 - protein, 24 aa, Artificial Sequence
  source: /note="Description of Artificial Sequence: Synthetic peptide"
AEAAAKEAAAKEAAAKEAAAKAAA

SEQ ID NO: 78 - protein, 29 aa, Artificial Sequence
  source: /note="Description of Artificial Sequence: Synthetic peptide"
AEAAAKEAAAKEAAAKEAAAKEAAAKAAA

SEQ ID NO: 79 - skipped

SEQ ID NO: 80 - protein, 246 aa, Artificial Sequence
  source: /note="Description of Artificial Sequence: Synthetic polypeptide"
QVQLVQSGAEVKKPGSSVKVSCKASGTDFKLTYIHWVRQAPGQGLEWMGRVSPGSGNTKYNEKFKGRVTITADTSTSTAYMELSSLRSEDTAVYYCAGSYYSYDVLDYWGQGTTVTVSSGGGGSGGGGSGGGGSGGGGSDIQMTQSPSFLSASVGDRVTITCKASQNVEDRVAWYQQKPGKAPKALIYSSSHRYKGVPSRFSGSGSGTEFTLTISSLQPEDFATYFCQQFKSYPLTFGQGTKLEIK

SEQ ID NO: 81 - protein, 107 aa, Artificial Sequence
  source: /note="Description of Artificial Sequence: Synthetic polypeptide"
DIQMTQSPSFLSASVGDRVTITCKASQNVEDRVAWYQQKPGKAPKALIYSSSHRYKGVPSRFSGSGSGTEFTLTISSLQPEDFATYFCQQFKSYPLTFGQGTKLEIK

SEQ ID NO: 82 - protein, 119 aa, Artificial Sequence
  source: /note="Description of Artificial Sequence: Synthetic polypeptide"
QVQLVQSGAEVKKPGSSVKVSCKASGTDFKLTYIHWVRQAPGQGLEWMGRVSPGSGNTKYNEKFKGRVTITADTSTSTAYMELSSLRSEDTAVYYCAGSYYSYDVLDYWGQGTTVTVSS

SEQ ID NO: 83 - protein, 246 aa, Artificial Sequence
  source: /note="Description of Artificial Sequence: Synthetic polypeptide"
QVQLVQSGAEVKKPGSSVKVSCKASGTDFDKIYIHWVRQAPGQGLEWMGRISAGSGNVKYNEKFKGRVTITADTSTSTAYMELSSLRSEDTAVYYCAGSYYSYDVLDYWGQGTTVTVSSGGGGSGGGGSGGGGSGGGGSDIQMTQSPSFLSASVGDRVTITCKASQNVEDRVAWYQQKPGKAPKALIYSSSHRYKGVPSRFSGSGSGTEFTLTISSLQPEDFATYFCQQFKSYPLTFGQGTKLEIK

SEQ ID NO: 84 - protein, 107 aa, Artificial Sequence; identical to SEQ ID NO: 81
  source: /note="Description of Artificial Sequence: Synthetic polypeptide"

SEQ ID NO: 85 - protein, 119 aa, Artificial Sequence
  source: /note="Description of Artificial Sequence: Synthetic polypeptide"
QVQLVQSGAEVKKPGSSVKVSCKASGTDFDKIYIHWVRQAPGQGLEWMGRISAGSGNVKYNEKFKGRVTITADTSTSTAYMELSSLRSEDTAVYYCAGSYYSYDVLDYWGQGTTVTVSS

SEQ ID NO: 86 - protein, 246 aa, Artificial Sequence
  source: /note="Description of Artificial Sequence: Synthetic polypeptide"
QVQLVQSGAEVKKPGSSVKVSCKASGHDFRDFYIHWVRQAPGQGLEWMGRVYPGSGSYRYNEKFKGRVTITADTSTSTAYMELSSLRSEDTAVYYCAGSYYSYDVLDYWGQGTTVTVSSGGGGSGGGGSGGGGSGGGGSDIQMTQSPSFLSASVGDRVTITCKASQNVDDRVAWYQQKPGKAPKALIYSSSHRYKGVPSRFSGSGSGTEFTLTISSLQPEDFATYFCQQFKSYPLTFGQGTKLEIK

SEQ ID NO: 87 - protein, 107 aa, Artificial Sequence
  source: /note="Description of Artificial Sequence: Synthetic polypeptide"
DIQMTQSPSFLSASVGDRVTITCKASQNVDDRVAWYQQKPGKAPKALIYSSSHRYKGVPSRFSGSGSGTEFTLTISSLQPEDFATYFCQQFKSYPLTFGQGTKLEIK

SEQ ID NO: 88 - protein, 119 aa, Artificial Sequence
  source: /note="Description of Artificial Sequence: Synthetic polypeptide"
QVQLVQSGAEVKKPGSSVKVSCKASGHDFRDFYIHWVRQAPGQGLEWMGRVYPGSGSYRYNEKFKGRVTITADTSTSTAYMELSSLRSEDTAVYYCAGSYYSYDVLDYWGQGTTVTVSS

SEQ ID NO: 89 - protein, 246 aa, Artificial Sequence
  source: /note="Description of Artificial Sequence: Synthetic polypeptide"
QVQLVQSGAEVKKPGSSVKVSCKASGHDFKLTYIHWVRQAPGQGLEWMGRISAGSGNVKYNEKFKGRVTITADTSTSTAYMELSSLRSEDTAVYYCAGSYYSYDVLDYWGQGTTVTVSSGGGGSGGGGSGGGGSGGGGSDIQMTQSPSFLSASVGDRVTITCKASQNVDNRVAWYQQKPGKAPKALIYSSSHRYKGVPSRFSGSGSGTEFTLTISSLQPEDFATYFCQQFKSYPLTFGQGTKLEIK

SEQ ID NO: 90 - protein, 107 aa, Artificial Sequence
  source: /note="Description of Artificial Sequence: Synthetic polypeptide"
DIQMTQSPSFLSASVGDRVTITCKASQNVDNRVAWYQQKPGKAPKALIYSSSHRYKGVPSRFSGSGSGTEFTLTISSLQPEDFATYFCQQFKSYPLTFGQGTKLEIK

SEQ ID NO: 91 - protein, 119 aa, Artificial Sequence
  source: /note="Description of Artificial Sequence: Synthetic polypeptide"
QVQLVQSGAEVKKPGSSVKVSCKASGHDFKLTYIHWVRQAPGQGLEWMGRISAGSGNVKYNEKFKGRVTITADTSTSTAYMELSSLRSEDTAVYYCAGSYYSYDVLDYWGQGTTVTVSS

SEQ ID NO: 92 - protein, 246 aa, Artificial Sequence
  source: /note="Description of Artificial Sequence: Synthetic polypeptide"
QVQLVQSGAEVKKPGSSVKVSCKASGTDFKLTYIHWVRQAPGQGLEWMGRIFPGSGNVKYNEKFKGRVTITADTSTSTAYMELSSLRSEDTAVYYCAGSYYSYDVLDYWGQGTTVTVSSGGGGSGGGGSGGGGSGGGGSDIQMTQSPSFLSASVGDRVTITCKASQNVENKVAWHQQKPGKAPKALIYSSSHRYKGVPSRFSGSGSGTEFTLTISSLQPEDFATYFCQQFKSYPLTFGQGTKLEIK

SEQ ID NO: 93 - protein, 107 aa, Artificial Sequence
  source: /note="Description of Artificial Sequence: Synthetic polypeptide"
DIQMTQSPSFLSASVGDRVTITCKASQNVENKVAWHQQKPGKAPKALIYSSSHRYKGVPSRFSGSGSGTEFTLTISSLQPEDFATYFCQQFKSYPLTFGQGTKLEIK

SEQ ID NO: 94 - protein, 119 aa, Artificial Sequence
  source: /note="Description of Artificial Sequence: Synthetic polypeptide"
QVQLVQSGAEVKKPGSSVKVSCKASGTDFKLTYIHWVRQAPGQGLEWMGRIFPGSGNVKYNEKFKGRVTITADTSTSTAYMELSSLRSEDTAVYYCAGSYYSYDVLDYWGQGTTVTVSS

SEQ ID NO: 95 - protein, 246 aa, Artificial Sequence
  source: /note="Description of Artificial Sequence: Synthetic polypeptide"
QVQLVQSGAEVKKPGSSVKVSCKASGTDFDKIYIHWVRQAPGQGLEWMGRIFAGSGNTKYNEKFKGRVTITADTSTSTAYMELSSLRSEDTAVYYCAGSYYSYDVLDYWGQGTTVTVSSGGGGSGGGGSGGGGSGGGGSDIQMTQSPSFLSASVGDRVTITCKASQNVDDRVAWYQQKPGKAPKALIYSSSHRYKGVPSRFSGSGSGTEFTLTISSLQPEDFATYFCQQFKSYPLTFGQGTKLEIK

SEQ ID NO: 96 - protein, 107 aa, Artificial Sequence; identical to SEQ ID NO: 87
  source: /note="Description of Artificial Sequence: Synthetic polypeptide"

SEQ ID NO: 97 - protein, 119 aa, Artificial Sequence
  source: /note="Description of Artificial Sequence: Synthetic polypeptide"
QVQLVQSGAEVKKPGSSVKVSCKASGTDFDKIYIHWVRQAPGQGLEWMGRIFAGSGNTKYNEKFKGRVTITADTSTSTAYMELSSLRSEDTAVYYCAGSYYSYDVLDYWGQGTTVTVSS

SEQ ID NO: 98 - protein, 246 aa, Artificial Sequence
  source: /note="Description of Artificial Sequence: Synthetic polypeptide"
QVQLVQSGAEVKKPGSSVKVSCKASGHDFDKFYIHWVRQAPGQGLEWMGRVSAGSGNVKYNEKFKGRVTITADTSTSTAYMELSSLRSEDTAVYYCAGSYYSYDVLDYWGQGTTVTVSSGGGGSGGGGSGGGGSGGGGSDIQMTQSPSFLSASVGDRVTITCKASQNVGNRVAWYQQKPGKAPKALIYSSSHRYSGVPSRFSGSGSGTEFTLTISSLQPEDFATYFCQQFKSYPLTFGQGTKLEIK

SEQ ID NO: 99 - protein, 107 aa, Artificial Sequence
  source: /note="Description of Artificial Sequence: Synthetic polypeptide"
DIQMTQSPSFLSASVGDRVTITCKASQNVGNRVAWYQQKPGKAPKALIYSSSHRYSGVPSRFSGSGSGTEFTLTISSLQPEDFATYFCQQFKSYPLTFGQGTKLEIK

SEQ ID NO: 100 - protein, 119 aa, Artificial Sequence
  source: /note="Description of Artificial Sequence: Synthetic polypeptide"
QVQLVQSGAEVKKPGSSVKVSCKASGHDFDKFYIHWVRQAPGQGLEWMGRVSAGSGNVKYNEKFKGRVTITADTSTSTAYMELSSLRSEDTAVYYCAGSYYSYDVLDYWGQGTTVTVSS

SEQ ID NO: 101 - protein, 247 aa, Artificial Sequence
  source: /note="Description of Artificial Sequence: Synthetic polypeptide"
QVQLVQSGAEVKKPGSSVKVSCKASGHDFDKFYIHWVRQAPGQGLEWMGRIFAGSGNVKYNEKFKGRVTITADTSTSTAYMELSSLRSEDTAVYYCAGSYYSYDVLDYWGQGTTVTVSSGGGGSGGGGSGGGGSGGGGSDIQMTQSPSFLSASVGDRVTITCKASQNVGDRVAWYQQKPGKAPKALIYSSSHRYKGVPSRFSGSGSGTEFTLTISSLQPEDFATYFCQQFKSYPLTFGQGTKLEIKS

SEQ ID NO: 102 - protein, 107 aa, Artificial Sequence
  source: /note="Description of Artificial Sequence: Synthetic polypeptide"
DIQMTQSPSFLSASVGDRVTITCKASQNVGDRVAWYQQKPGKAPKALIYSSSHRYKGVPSRFSGSGSGTEFTLTISSLQPEDFATYFCQQFKSYPLTFGQGTKLEIK

SEQ ID NO: 103 - protein, 119 aa, Artificial Sequence
  source: /note="Description of Artificial Sequence: Synthetic polypeptide"
QVQLVQSGAEVKKPGSSVKVSCKASGHDFDKFYIHWVRQAPGQGLEWMGRIFAGSGNVKYNEKFKGRVTITADTSTSTAYMELSSLRSEDTAVYYCAGSYYSYDVLDYWGQGTTVTVSS

SEQ ID NO: 104 - protein, 246 aa, Artificial Sequence
  source: /note="Description of Artificial Sequence: Synthetic polypeptide"
QVQLVQSGAEVKKPGSSVKVSCKASGTDFKLTYIHWVRQAPGQGLEWMGRVSPGSGNVKYNEKFKGRVTITADTSTSTAYMELSSLRSEDTAVYYCAGSYYSYDVLDYWGQGTTVTVSSGGGGSGGGGSGGGGSGGGGSDIQMTQSPSFLSASVGDRVTITCKASQNVGDRVAWYQQKPGKAPKALIYSSSHRYKGVPSRFSGSGSGTEFTLTISSLQPEDFATYFCQQFKSYPLTFGQGTKLEIK

SEQ ID NO: 105 - protein, 107 aa, Artificial Sequence; identical to SEQ ID NO: 102
  source: /note="Description of Artificial Sequence: Synthetic polypeptide"

SEQ ID NO: 106 - protein, 119 aa, Artificial Sequence
  source: /note="Description of Artificial Sequence: Synthetic polypeptide"
QVQLVQSGAEVKKPGSSVKVSCKASGTDFKLTYIHWVRQAPGQGLEWMGRVSPGSGNVKYNEKFKGRVTITADTSTSTAYMELSSLRSEDTAVYYCAGSYYSYDVLDYWGQGTTVTVSS

SEQ ID NO: 107 - protein, 246 aa, Artificial Sequence
  source: /note="Description of Artificial Sequence: Synthetic polypeptide"
QVQLVQSGAEVKKPGSSVKVSCKASGTDFDKIYIHWVRQAPGQGLEWMGRVSAGSGNTKYNEKFKGRVTITADTSTSTAYMELSSLRSEDTAVYYCAGSYYSYDVLDYWGQGTTVTVSSGGGGSGGGGSGGGGSGGGGSDIQMTQSPSFLSASVGDRVTITCKASQNVGNRVAWYQQKPGKAPKALIYSSSHRYKGVPSRFSGSGSGTEFTLTISSLQPEDFATYFCQQFKSYPLTFGQGTKLEIK

SEQ ID NO: 108 - protein, 107 aa, Artificial Sequence
  source: /note="Description of Artificial Sequence: Synthetic polypeptide"
DIQMTQSPSFLSASVGDRVTITCKASQNVGNRVAWYQQKPGKAPKALIYSSSHRYKGVPSRFSGSGSGTEFTLTISSLQPEDFATYFCQQFKSYPLTFGQGTKLEIK

SEQ ID NO: 109 - protein, 119 aa, Artificial Sequence
  source: /note="Description of Artificial Sequence: Synthetic polypeptide"
QVQLVQSGAEVKKPGSSVKVSCKASGTDFDKIYIHWVRQAPGQGLEWMGRVSAGSGNTKYNEKFKGRVTITADTSTSTAYMELSSLRSEDTAVYYCAGSYYSYDVLDYWGQGTTVTVSS

SEQ ID NO: 110 - protein, 246 aa, Artificial Sequence
  source: /note="Description of Artificial Sequence: Synthetic polypeptide"
QVQLVQSGAEVKKPGSSVKVSCKASGTDFKLTYIHWVRQAPGQGLEWMGRIFPGSGNVKYNEKFKGRVTITADTSTSTAYMELSSLRSEDTAVYYCAGSYYSYDVLDYWGQGTTVTVSSGGGGSGGGGSGGGGSGGGGSDIQMTQSPSFLSASVGDRVTITCKASQNVDNRVAWYQQKPGKAPKALIYSSSHRYKGVPSRFSGSGSGTEFTLTISSLQPEDFATYFCQQFKSYPLTFGQGTKLEIK

SEQ ID NO: 111 - protein, 107 aa, Artificial Sequence; identical to SEQ ID NO: 90
  source: /note="Description of Artificial Sequence: Synthetic polypeptide"

SEQ ID NO: 112 - protein, 119 aa, Artificial Sequence; identical to SEQ ID NO: 94
  source: /note="Description of Artificial Sequence: Synthetic polypeptide"

SEQ ID NO: 113 - protein, 246 aa, Artificial Sequence
  source: /note="Description of Artificial Sequence: Synthetic polypeptide"
QVQLVQSGAEVKKPGSSVKVSCKASGTDFDKIYIHWVRQAPGQGLEWMGRISAGSGNTKYNEKFKGRVTITADTSTSTAYMELSSLRSEDTAVYYCAGSYYSYDVLDYWGQGTTVTVSSGGGGSGGGGSGGGGSGGGGSDIQMTQSPSFLSASVGDRVTITCKASQNVDDRVAWYQQKPGKAPKALIYSSSHRYKGVPSRFSGSGSGTEFTLTISSLQPEDFATYFCQQFKSYPLTFGQGTKLEIK

SEQ ID NO: 114 - protein, 107 aa, Artificial Sequence; identical to SEQ ID NO: 87
  source: /note="Description of Artificial Sequence: Synthetic polypeptide"

SEQ ID NO: 115 - protein, 119 aa, Artificial Sequence
  source: /note="Description of Artificial Sequence: Synthetic polypeptide"
QVQLVQSGAEVKKPGSSVKVSCKASGTDFDKIYIHWVRQAPGQGLEWMGRISAGSGNTKYNEKFKGRVTITADTSTSTAYMELSSLRSEDTAVYYCAGSYYSYDVLDYWGQGTTVTVSS

SEQ ID NO: 116 - protein, 246 aa, Artificial Sequence
  source: /note="Description of Artificial Sequence: Synthetic polypeptide"
QVQLVQSGAEVKKPGSSVKVSCKASGTDFRLTYIHWVRQAPGQGLEWMGRVSPGSGNTKYNEKFKGRVTITADTSTSTAYMELSSLRSEDTAVYYCAGSYYSYDVLDYWGQGTTVTVSSGGGGSGGGGSGGGGSGGGGSDIQMTQSPSFLSASVGDRVTITCKASQNVDNKVAWHQQKPGKAPKALIYSSSHRYKGVPSRFSGSGSGTEFTLTISSLQPEDFATYFCQQFKSYPLTFGQGTKLEIK

SEQ ID NO: 117 - protein, 107 aa, Artificial Sequence
  source: /note="Description of Artificial Sequence: Synthetic polypeptide"
DIQMTQSPSFLSASVGDRVTITCKASQNVDNKVAWHQQKPGKAPKALIYSSSHRYKGVPSRFSGSGSGTEFTLTISSLQPEDFATYFCQQFKSYPLTFGQGTKLEIK

SEQ ID NO: 118 - protein, 119 aa, Artificial Sequence
  source: /note="Description of Artificial Sequence: Synthetic polypeptide"
QVQLVQSGAEVKKPGSSVKVSCKASGTDFRLTYIHWVRQAPGQGLEWMGRVSPGSGNTKYNEKFKGRVTITADTSTSTAYMELSSLRSEDTAVYYCAGSYYSYDVLDYWGQGTTVTVSS

SEQ ID NO: 119 - protein, 246 aa, Artificial Sequence
  source: /note="Description of Artificial Sequence: Synthetic polypeptide"
QVQLVQSGAEVKKPGSSVKVSCKASGGTFRLTYIHWVRQAPGQGLEWMGRVYPGSGNTKYNEKFKGRVTITADTSTSTAYMELSSLRSEDTAVYYCAGSYYSYDVLDYWGQGTTVTVSSGGGGSGGGGSGGGGSGGGGSDIQMTQSPSFLSASVGDRVTITCKASQNVDDRVAWYQQKPGKAPKALIYSSSHRYKGVPSRFSGSGSGTEFTLTISSLQPEDFATYFCQQFKSYPLTFGQGTKLEIK

SEQ ID NO: 120 - protein, 107 aa, Artificial Sequence; identical to SEQ ID NO: 87
  source: /note="Description of Artificial Sequence: Synthetic polypeptide"

SEQ ID NO: 121 - protein, 119 aa, Artificial Sequence
  source: /note="Description of Artificial Sequence: Synthetic polypeptide"
QVQLVQSGAEVKKPGSSVKVSCKASGGTFRLTYIHWVRQAPGQGLEWMGRVYPGSGNTKYNEKFKGRVTITADTSTSTAYMELSSLRSEDTAVYYCAGSYYSYDVLDYWGQGTTVTVSS

SEQ ID NO: 122 - protein, 246 aa, Artificial Sequence
  source: /note="Description of Artificial Sequence: Synthetic polypeptide"
QVQLVQSGAEVKKPGSSVKVSCKASGTDFRLTYIHWVRQAPGQGLEWMGRIFPGSGNTKYNEKFKGRVTITADTSTSTAYMELSSLRSEDTAVYYCAGSYYSYDVLDYWGQGTTVTVSSGGGGSGGGGSGGGGSGGGGSDIQMTQSPSFLSASVGDRVTITCKASQNVDDRVAWYQQKPGKAPKALIYSSSHRYKGVPSRFSGSGSGTEFTLTISSLQPEDFATYFCQQFKSYPLTFGQGTKLEIK

SEQ ID NO: 123 - protein, 107 aa, Artificial Sequence; identical to SEQ ID NO: 87
  source: /note="Description of Artificial Sequence: Synthetic polypeptide"

SEQ ID NO: 124 - protein, 119 aa, Artificial Sequence
  source: /note="Description of Artificial Sequence: Synthetic polypeptide"
QVQLVQSGAEVKKPGSSVKVSCKASGTDFRLTYIHWVRQAPGQGLEWMGRIFPGSGNTKYNEKFKGRVTITADTSTSTAYMELSSLRSEDTAVYYCAGSYYSYDVLDYWGQGTTVTVSS

SEQ ID NO: 125 - protein, 246 aa, Artificial Sequence
  source: /note="Description of Artificial Sequence: Synthetic polypeptide"
QVQLVQSGAEVKKPGSSVKVSCKASGTDFKLTYIHWVRQAPGQGLEWMGRIFPGSGNVKYNEKFKGRVTITADTSTSTAYMELSSLRSEDTAVYYCAGSYYSYDVLDYWGQGTTVTVSSGGGGSGGGGSGGGGSGGGGSDIQMTQSPSFLSASVGDRVTITCKASQNVEDRVAWYQQKPGKAPKALIYSSSHRYKGVPSRFSGSGSGTEFTLTISSLQPEDFATYFCQQFKSYPLTFGQGTKLEIK

SEQ ID NO: 126 - protein, 107 aa, Artificial Sequence; identical to SEQ ID NO: 81
  source: /note="Description of Artificial Sequence: Synthetic polypeptide"

SEQ ID NO: 127 - protein, 119 aa, Artificial Sequence; identical to SEQ ID NO: 94
  source: /note="Description of Artificial Sequence: Synthetic polypeptide"

SEQ ID NO: 128 - protein, 246 aa, Artificial Sequence
  source: /note="Description of Artificial Sequence: Synthetic polypeptide"
QVQLVQSGAEVKKPGSSVKVSCKASGGTFRLTYIHWVRQAPGQGLEWMGRISAGSGNVKYNEKFKGRVTITADTSTSTAYMELSSLRSEDTAVYYCAGSYYSYDVLDYWGQGTTVTVSSGGGGSGGGGSGGGGSGGGGSDIQMTQSPSFLSASVGDRVTITCKASQNVGDRVAWYQQKPGKAPKALIYSSSHRYKGVPSRFSGSGSGTEFTLTISSLQPEDFATYFCQQFKSYPLTFGQGTKLEIK

SEQ ID NO: 129 - protein, 107 aa, Artificial Sequence; identical to SEQ ID NO: 102
  source: /note="Description of Artificial Sequence: Synthetic polypeptide"

SEQ ID NO: 130 - protein, 119 aa, Artificial Sequence
  source: /note="Description of Artificial Sequence: Synthetic polypeptide"
QVQLVQSGAEVKKPGSSVKVSCKASGGTFRLTYIHWVRQAPGQGLEWMGRISAGSGNVKYNEKFKGRVTITADTSTSTAYMELSSLRSEDTAVYYCAGSYYSYDVLDYWGQGTTVTVSS

SEQ ID NO: 131 - protein, 246 aa, Artificial Sequence
  source: /note="Description of Artificial Sequence: Synthetic polypeptide"
QVQLVQSGAEVKKPGSSVKVSCKASGGTFDKTYIHWVRQAPGQGLEWMGRISAGSGNTKYNEKFKGRVTITADTSTSTAYMELSSLRSEDTAVYYCAGSYYSYDVLDYWGQGTTVTVSSGGGGSGGGGSGGGGSGGGGSDIQMTQSPSFLSASVGDRVTITCKASQNVDDRVAWYQQKPGKAPKALIYSSSHRYKGVPSRFSGSGSGTEFTLTISSLQPEDFATYFCQQFKSYPLTFGQGTKLEIK

SEQ ID NO: 132 - protein, 107 aa, Artificial Sequence; identical to SEQ ID NO: 87
  source: /note="Description of Artificial Sequence: Synthetic polypeptide"

SEQ ID NO: 133 - protein, 119 aa, Artificial Sequence
  source: /note="Description of Artificial Sequence: Synthetic polypeptide"
QVQLVQSGAEVKKPGSSVKVSCKASGGTFDKTYIHWVRQAPGQGLEWMGRISAGSGNTKYNEKFKGRVTITADTSTSTAYMELSSLRSEDTAVYYCAGSYYSYDVLDYWGQGTTVTVSS

SEQ ID NO: 134 - protein, 246 aa, Artificial Sequence
  source: /note="Description of Artificial Sequence: Synthetic polypeptide"
QVQLVQSGAEVKKPGSSVKVSCKASGHDFDKFYIHWVRQAPGQGLEWMGRISAGSGNTKYNEKFKGRVTITADTSTSTAYMELSSLRSEDTAVYYCAGSYYSYDVLDYWGQGTTVTVSSGGGGSGGGGSGGGGSGGGGSDIQMTQSPSFLSASVGDRVTITCKASQNVDDRVAWYQQKPGKAPKALIYSSSHRYKGVPSRFSGSGSGTEFTLTISSLQPEDFATYFCQQFKSYPLTFGQGTKLEIK

SEQ ID NO: 135 - protein, 107 aa, Artificial Sequence; identical to SEQ ID NO: 87
  source: /note="Description of Artificial Sequence: Synthetic polypeptide"

SEQ ID NO: 136 - protein, 119 aa, Artificial Sequence
  source: /note="Description of Artificial Sequence: Synthetic polypeptide"
QVQLVQSGAEVKKPGSSVKVSCKASGHDFDKFYIHWVRQAPGQGLEWMGRISAGSGNTKYNEKFKGRVTITADTSTSTAYMELSSLRSEDTAVYYCAGSYYSYDVLDYWGQGTTVTVSS

SEQ ID NO: 137 - protein, 246 aa, Artificial Sequence
  source: /note="Description of Artificial Sequence: Synthetic polypeptide"
QVQLVQSGAEVKKPGSSVKVSCKASGTDFKLTYIHWVRQAPGQGLEWMGRISAGSGNVKYNEKFKGRVTITADTSTSTAYMELSSLRSEDTAVYYCAGSYYSYDVLDYWGQGTTVTVSSGGGGSGGGGSGGGGSGGGGSDIQMTQSPSFLSASVGDRVTITCKASQNVDNKVAWHQQKPGKAPKALIYSSSHRYKGVPSRFSGSGSGTEFTLTISSLQPEDFATYFCQQFKSYPLTFGQGTKLEIK

SEQ ID NO: 138 - protein, 107 aa, Artificial Sequence; identical to SEQ ID NO: 117
  source: /note="Description of Artificial Sequence: Synthetic polypeptide"

SEQ ID NO: 139 - protein, 119 aa, Artificial Sequence
  source: /note="Description of Artificial Sequence: Synthetic polypeptide"
QVQLVQSGAEVKKPGSSVKVSCKASGTDFKLTYIHWVRQAPGQGLEWMGRISAGSGNVKYNEKFKGRVTITADTSTSTAYMELSSLRSEDTAVYYCAGSYYSYDVLDYWGQGTTVTVSS

SEQ ID NO: 140 - protein, 246 aa, Artificial Sequence
  source: /note="Description of Artificial Sequence: Synthetic polypeptide"
QVQLVQSGAEVKKPGSSVKVSCKASGHDFRLTYIHWVRQAPGQGLEWMGRISAGSGNVKYNEKFKGRVTITADTSTSTAYMELSSLRSEDTAVYYCAGSYYSYDVLDYWGQGTTVTVSSGGGGSGGGGSGGGGSGGGGSDIQMTQSPSFLSASVGDRVTITCKASQNVADRVAWYQQKPGKAPKALIYSSSHRYKGVPSRFSGSGSGTEFTLTISSLQPEDFATYFCQQFKSYPLTFGQGTKLEIK

SEQ ID NO: 141 - protein, 107 aa, Artificial Sequence
  source: /note="Description of Artificial Sequence: Synthetic polypeptide"
DIQMTQSPSFLSASVGDRVTITCKASQNVADRVAWYQQKPGKAPKALIYSSSHRYKGVPSRFSGSGSGTEFTLTISSLQPEDFATYFCQQFKSYPLTFGQGTKLEIK

SEQ ID NO: 142 - protein, 119 aa, Artificial Sequence
  source: /note="Description of Artificial Sequence: Synthetic polypeptide"
QVQLVQSGAEVKKPGSSVKVSCKASGHDFRLTYIHWVRQAPGQGLEWMGRISAGSGNVKYNEKFKGRVTITADTSTSTAYMELSSLRSEDTAVYYCAGSYYSYDVLDYWGQGTTVTVSS

SEQ ID NO: 143 - protein, 246 aa, Artificial Sequence
  source: /note="Description of Artificial Sequence: Synthetic polypeptide"
QVQLVQSGAEVKKPGSSVKVSCKASGHDFHLWYIHWVRQAPGQGLEWMGRVSAGSGNVKYNEKFKGRVTITADTSTSTAYMELSSLRSEDTAVYYCAGSYYSYDVLDYWGQGTTVTVSSGGGGSGGGGSGGGGSGGGGSDIQMTQSPSFLSASVGDRVTITCKASQNVDNKVAWHQQKPGKAPKALIYSSSHRYKGVPSRFSGSGSGTEFTLTISSLQPEDFATYFCQQFKSYPLTFGQGTKLEIK

SEQ ID NO: 144 - protein, 107 aa, Artificial Sequence; identical to SEQ ID NO: 117
  source: /note="Description of Artificial Sequence: Synthetic polypeptide"

SEQ ID NO: 145 - protein, 119 aa, Artificial Sequence
  source: /note="Description of Artificial Sequence: Synthetic polypeptide"
QVQLVQSGAEVKKPGSSVKVSCKASGHDFHLWYIHWVRQAPGQGLEWMGRVSAGSGNVKYNEKFKGRVTITADTSTSTAYMELSSLRSEDTAVYYCAGSYYSYDVLDYWGQGTTVTVSS

SEQ ID NO: 146 - protein, 246 aa, Artificial Sequence
  source: /note="Description of Artificial Sequence: Synthetic polypeptide"
QVQLVQSGAEVKKPGSSVKVSCKASGHDFHLWYIHWVRQAPGQGLEWMGRVFAGSGNTKYNEKFKGRVTITADTSTSTAYMELSSLRSEDTAVYYCAGSYYSYDVLDYWGQGTTVTVSSGGGGSGGGGSGGGGSGGGGSDIQMTQSPSFLSASVGDRVTITCKASQNVEDKVAWYQQKPGKAPKALIYSSSHRYKGVPSRFSGSGSGTEFTLTISSLQPEDFATYFCQQFKSYPLTFGQGTKLEIK

SEQ ID NO: 147 - protein, 107 aa, Artificial Sequence
  source: /note="Description of Artificial Sequence: Synthetic polypeptide"
DIQMTQSPSFLSASVGDRVTITCKASQNVEDKVAWYQQKPGKAPKALIYSSSHRYKGVPSRFSGSGSGTEFTLTISSLQPEDFATYFCQQFKSYPLTFGQGTKLEIK

SEQ ID NO: 148 - protein, 119 aa, Artificial Sequence
  source: /note="Description of Artificial Sequence: Synthetic polypeptide"
QVQLVQSGAEVKKPGSSVKVSCKASGHDFHLWYIHWVRQAPGQGLEWMGRVFAGSGNTKYNEKFKGRVTITADTSTSTAYMELSSLRSEDTAVYYCAGSYYSYDVLDYWGQGTTVTVSS

SEQ ID NO: 149 - protein, 246 aa, Artificial Sequence
  source: /note="Description of Artificial Sequence: Synthetic polypeptide"
QVQLVQSGAEVKKPGSSVKVSCKASGTDFKLTYIHWVRQAPGQGLEWMGRIFPGSGNTKYNEKFKGRVTITADTSTSTAYMELSSLRSEDTAVYYCAGSYYSYDVLDYWGQGTTVTVSSGGGGSGGGGSGGGGSGGGGSDIQMTQSPSFLSASVGDRVTITCKASQNVDDRVAWYQQKPGKAPKALIYSSSHRYKGVPSRFSGSGSGTEFTLTISSLQPEDFATYFCQQFKSYPLTFGQGTKLEIK

SEQ ID NO: 150 - protein, 107 aa, Artificial Sequence; identical to SEQ ID NO: 87
  source: /note="Description of Artificial Sequence: Synthetic polypeptide"

SEQ ID NO: 151 - protein, 119 aa, Artificial Sequence
  source: /note="Description of Artificial Sequence: Synthetic polypeptide"
QVQLVQSGAEVKKPGSSVKVSCKASGTDFKLTYIHWVRQAPGQGLEWMGRIFPGSGNTKYNEKFKGRVTITADTSTSTAYMELSSLRSEDTAVYYCAGSYYSYDVLDYWGQGTTVTVSS

SEQ ID NO: 152 - skipped

SEQ ID NO: 153 - protein, 246 aa, Artificial Sequence
  source: /note="Description of Artificial Sequence: Synthetic polypeptide"
QVQLVQSGAEVKKPGSSVKVSCKASGTDFKLTYIHWVRQAPGQGLEWMGRVSAGSGNVKYNEKFKGRVTITADTSTSTAYMELSSLRSEDTAVYYCAGSYYSYDVLDYWGQGTTVTVSSGGGGSGGGGSGGGGSGGGGSDIQMTQSPSFLSASVGDRVTITCKASQNVGNRVAWYQQKPGKAPKALIYSSSHRYKGVPSRFSGSGSGTEFTLTISSLQPEDFATYFCQQFKSYPLTFGQGTKLEIK

SEQ ID NO: 154 - protein, 107 aa, Artificial Sequence; identical to SEQ ID NO: 108
  source: /note="Description of Artificial Sequence: Synthetic polypeptide"

SEQ ID NO: 155 - protein, 119 aa, Artificial Sequence
  source: /note="Description of Artificial Sequence: Synthetic polypeptide"
QVQLVQSGAEVKKPGSSVKVSCKASGTDFKLTYIHWVRQAPGQGLEWMGRVSAGSGNVKYNEKFKGRVTITADTSTSTAYMELSSLRSEDTAVYYCAGSYYSYDVLDYWGQGTTVTVSS

SEQ ID NO: 156 - protein, 246 aa, Artificial Sequence
  source: /note="Description of Artificial Sequence: Synthetic polypeptide"
QVQLVQSGAEVKKPGSSVKVSCKASGTDFKLTYIHWVRQAPGQGLEWMGRISPGSGNTKYNEKFKGRVTITADTSTSTAYMELSSLRSEDTAVYYCAGSYYSYDVLDYWGQGTTVTVSSGGGGSGGGGSGGGGSGGGGSDIQMTQSPSFLSASVGDRVTITCKASQNVGDRVAWYQQKPGKAPKALIYSSSHRYKGVPSRFSGSGSGTEFTLTISSLQPEDFATYFCQQFKSYPLTFGQGTKLEIK

SEQ ID NO: 157 - protein, 107 aa, Artificial Sequence; identical to SEQ ID NO: 102
  source: /note="Description of Artificial Sequence: Synthetic polypeptide"

SEQ ID NO: 158 - protein, 119 aa, Artificial Sequence
  source: /note="Description of Artificial Sequence: Synthetic polypeptide"
QVQLVQSGAEVKKPGSSVKVSCKASGTDFKLTYIHWVRQAPGQGLEWMGRISPGSGNTKYNEKFKGRVTITADTSTSTAYMELSSLRSEDTAVYYCAGSYYSYDVLDYWGQGTTVTVSS

SEQ ID NO: 159 - protein, 246 aa, Artificial Sequence
  source: /note="Description of Artificial Sequence: Synthetic polypeptide"
QVQLVQSGAEVKKPGSSVKVSCKASGHDFHLWYIHWVRQAPGQGLEWMGRISPGSGNVKYNEKFKGRVTITADTSTSTAYMELSSLRSEDTAVYYCAGSYYSYDVLDYWGQGTTVTVSSGGGGSGGGGSGGGGSGGGGSDIQMTQSPSFLSASVGDRVTITCKASQNVGDRVAWHQQKPGKAPKALIYSSSHRYKGVPSRFSGSGSGTEFTLTISSLQPEDFATYFCQQFKSYPLTFGQGTKLEIK

SEQ ID NO: 160 - protein, 107 aa, Artificial Sequence
  source: /note="Description of Artificial Sequence: Synthetic polypeptide"
DIQMTQSPSFLSASVGDRVTITCKASQNVGDRVAWHQQKPGKAPKALIYSSSHRYKGVPSRFSGSGSGTEFTLTISSLQPEDFATYFCQQFKSYPLTFGQGTKLEIK

SEQ ID NO: 161 - protein, 119 aa, Artificial Sequence
  source: /note="Description of Artificial Sequence: Synthetic polypeptide"
QVQLVQSGAEVKKPGSSVKVSCKASGHDFHLWYIHWVRQAPGQGLEWMGRISPGSGNVKYNEKFKGRVTITADTSTSTAYMELSSLRSEDTAVYYCAGSYYSYDVLDYWGQGTTVTVSS

SEQ ID NO: 162 - protein, 246 aa, Artificial Sequence
  source: /note="Description of Artificial Sequence: Synthetic polypeptide"
QVQLVQSGAEVKKPGSSVKVSCKASGHDFKLTYIHWVRQAPGQGLEWMGRISAGSGNVKYNEKFKGRVTITADTSTSTAYMELSSLRSEDTAVYYCAGSYYSYDVLDYWGQGTTVTVSSGGGGSGGGGSGGGGSGGGGSDIQMTQSPSFLSASVGDRVTITCKASQNVDDRVAWYQQKPGKAPKALIYSSSHRYKGVPSRFSGSGSGTEFTLTISSLQPEDFATYFCQQFKSYPLTFGQGTKLEIK

SEQ ID NO: 163 - protein, 107 aa, Artificial Sequence; identical to SEQ ID NO: 87
  source: /note="Description of Artificial Sequence: Synthetic polypeptide"

SEQ ID NO: 164 - protein, 119 aa, Artificial Sequence; identical to SEQ ID NO: 91
  source: /note="Description of Artificial Sequence: Synthetic polypeptide"

SEQ ID NO: 165 - protein, 246 aa, Artificial Sequence
  source: /note="Description of Artificial Sequence: Synthetic polypeptide"
QVQLVQSGAEVKKPGSSVKVSCKASGTDFHLWYIHWVRQAPGQGLEWMGRVFAGSGSYRYNEKFKGRVTITADTSTSTAYMELSSLRSEDTAVYYCAGSYYSYDVLDYWGQGTTVTVSSGGGGSGGGGSGGGGSGGGGSDIQMTQSPSFLSASVGDRVTITCKASQNVDDRVAWYQQKPGKAPKALIYSSSHRYKGVPSRFSGSGSGTEFTLTISSLQPEDFATYFCQQFKSYPLTFGQGTKLEIK

SEQ ID NO: 166 - protein, 107 aa, Artificial Sequence; identical to SEQ ID NO: 87
  source: /note="Description of Artificial Sequence: Synthetic polypeptide"

SEQ ID NO: 167 - protein, 119 aa, Artificial Sequence
  source: /note="Description of Artificial Sequence: Synthetic polypeptide"
QVQLVQSGAEVKKPGSSVKVSCKASGTDFHLWYIHWVRQAPGQGLEWMGRVFAGSGSYRYNEKFKGRVTITADTSTSTAYMELSSLRSEDTAVYYCAGSYYSYDVLDYWGQGTTVTVSS

SEQ ID NO: 168 - protein, 246 aa, Artificial Sequence
  source: /note="Description of Artificial Sequence: Synthetic polypeptide"
QVQLVQSGAEVKKPGSSVKVSCKASGTDFDKIYIHWVRQAPGQGLEWMGRISAGSGNTKYNEKFKGRVTITADTSTSTAYMELSSLRSEDTAVYYCAGSYYSYDVLDYWGQGTTVTVSSGGGGSGGGGSGGGGSGGGGSDIQMTQSPSFLSASVGDRVTITCKASQNVADRVAWYQQKPGKAPKALIYSSSHRYKGVPSRFSGSGSGTEFTLTISSLQPEDFATYFCQQFKSYPLTFGQGTKLEIK

SEQ ID NO: 169 - protein, 107 aa, Artificial Sequence; identical to SEQ ID NO: 141
  source: /note="Description of Artificial Sequence: Synthetic polypeptide"

SEQ ID NO: 170 - protein, 119 aa, Artificial Sequence; identical to SEQ ID NO: 115
  source: /note="Description of Artificial Sequence: Synthetic polypeptide"

SEQ ID NO: 171 - protein, 246 aa, Artificial Sequence
  source: /note="Description of Artificial Sequence: Synthetic polypeptide"
QVQLVQSGAEVKKPGSSVKVSCKASGTDFKLTYIHWVRQAPGQGLEWMGRISAGSGNTKYNEKFKGRVTITADTSTSTAYMELSSLRSEDTAVYYCAGSYYSYDVLDYWGQGTTVTVSSGGGGSGGGGSGGGGSGGGGSDIQMTQSPSFLSASVGDRVTITCKASQNVEDRVAWYQQKPGKAPKALIYSSSHRYKGVPSRFSGSGSGTEFTLTISSLQPEDFATYFCQQFKSYPLTFGQGTKLEIK

SEQ ID NO: 172 - protein, 107 aa, Artificial Sequence; identical to SEQ ID NO: 81
  source: /note="Description of Artificial Sequence: Synthetic polypeptide"

SEQ ID NO: 173 - protein, 119 aa, Artificial Sequence
  source: /note="Description of Artificial Sequence: Synthetic polypeptide"
QVQLVQSGAEVKKPGSSVKVSCKASGTDFKLTYIHWVRQAPGQGLEWMGRISAGSGNTKYNEKFKGRVTITADTSTSTAYMELSSLRSEDTAVYYCAGSYYSYDVLDYWGQGTTVTVSS

SEQ ID NO: 174 - protein, 246 aa, Artificial Sequence
  source: /note="Description of Artificial Sequence: Synthetic polypeptide"
QVQLVQSGAEVKKPGSSVKVSCKASGTDFRLTYIHWVRQAPGQGLEWMGRISPGSGNTKYNEKFKGRVTITADTSTSTAYMELSSLRSEDTAVYYCAGSYYSYDVLDYWGQGTTVTVSSGGGGSGGGGSGGGGSGGGGSDIQMTQSPSFLSASVGDRVTITCKASQNVGNRVAWYQQKPGKAPKALIYSSSHRYKGVPSRFSGSGSGTEFTLTISSLQPEDFATYFCQQFKSYPLTFGQGTKLEIK

SEQ ID NO: 175 - protein, 107 aa, Artificial Sequence; identical to SEQ ID NO: 108
  source: /note="Description of Artificial Sequence: Synthetic polypeptide"

SEQ ID NO: 176 - protein, 119 aa, Artificial Sequence
  source: /note="Description of Artificial Sequence: Synthetic polypeptide"
QVQLVQSGAEVKKPGSSVKVSCKASGTDFRLTYIHWVRQAPGQGLEWMGRISPGSGNTKYNEKFKGRVTITADTSTSTAYMELSSLRSEDTAVYYCAGSYYSYDVLDYWGQGTTVTVSS

SEQ ID NO: 177 - protein, 246 aa, Artificial Sequence
  source: /note="Description of Artificial Sequence: Synthetic polypeptide"
QVQLVQSGAEVKKPGSSVKVSCKASGHDFDKTYIHWVRQAPGQGLEWMGRVSAGSGNVKYNEKFKGRVTITADTSTSTAYMELSSLRSEDTAVYYCAGSYYSYDVLDYWGQGTTVTVSSGGGGSGGGGSGGGGSGGGGSDIQMTQSPSFLSASVGDRVTITCKASQNVEDRVAWYQQKPGKAPKALIYSSSHRYKGVPSRFSGSGSGTEFTLTISSLQPEDFATYFCQQFKSYPLTFGQGTKLEIK

SEQ ID NO: 178 - protein, 107 aa, Artificial Sequence; identical to SEQ ID NO: 81
  source: /note="Description of Artificial Sequence: Synthetic polypeptide"

SEQ ID NO: 179 - protein, 119 aa, Artificial Sequence
  source: /note="Description of Artificial Sequence: Synthetic polypeptide"
QVQLVQSGAEVKKPGSSVKVSCKASGHDFDKTYIHWVRQAPGQGLEWMGRVSAGSGNVKYNEKFKGRVTITADTSTSTAYMELSSLRSEDTAVYYCAGSYYSYDVLDYWGQGTTVTVSS

SEQ ID NO: 180 - protein, 246 aa, Artificial Sequence
  source: /note="Description of Artificial Sequence: Synthetic polypeptide"
QVQLVQSGAEVKKPGSSVKVSCKASGHDFKLTYIHWVRQAPGQGLEWMGRVSPGSGNTKYNEKFKGRVTITADTSTSTAYMELSSLRSEDTAVYYCAGSYYSYDVLDYWGQGTTVTVSSGGGGSGGGGSGGGGSGGGGSDIQMTQSPSFLSASVGDRVTITCKASQNVEDRVAWHQQKPGKAPKALIYSSSHRYKGVPSRFSGSGSGTEFTLTISSLQPEDFATYFCQQFKSYPLTFGQGTKLEIK

SEQ ID NO: 181 - protein, 107 aa, Artificial Sequence
  source: /note="Description of Artificial Sequence: Synthetic polypeptide"
DIQMTQSPSFLSASVGDRVTITCKASQNVEDRVAWHQQKPGKAPKALIYSSSHRYKGVPSRFSGSGSGTEFTLTISSLQPEDFATYFCQQFKSYPLTFGQGTKLEIK

SEQ ID NO: 182 - protein, 119 aa, Artificial Sequence
  source: /note="Description of Artificial Sequence: Synthetic polypeptide"
QVQLVQSGAEVKKPGSSVKVSCKASGHDFKLTYIHWVRQAPGQGLEWMGRVSPGSGNTKYNEKFKGRVTITADTSTSTAYMELSSLRSEDTAVYYCAGSYYSYDVLDYWGQGTTVTVSS

SEQ ID NO: 183 - protein, 246 aa, Artificial Sequence
  source: /note="Description of Artificial Sequence: Synthetic polypeptide"
QVQLVQSGAEVKKPGSSVKVSCKASGHDFDKTYIHWVRQAPGQGLEWMGRIYPGSGNVKYNEKFKGRVTITADTSTSTAYMELSSLRSEDTAVYYCAGSYYSYDVLDYWGQGTTVTVSSGGGGSGGGGSGGGGSGGGGSDIQMTQSPSFLSASVGDRVTITCKASQNVADRVAWYQQKPGKAPKALIYSSSHRYKGVPSRFSGSGSGTEFTLTISSLQPEDFATYFCQQFKSYPLTFGQGTKLEIK

SEQ ID NO: 184 - protein, 107 aa, Artificial Sequence; identical to SEQ ID NO: 141
  source: /note="Description of Artificial Sequence: Synthetic polypeptide"

SEQ ID NO: 185 - protein, 119 aa, Artificial Sequence
  source: /note="Description of Artificial Sequence: Synthetic polypeptide"
QVQLVQSGAEVKKPGSSVKVSCKASGHDFDKTYIHWVRQAPGQGLEWMGRIYPGSGNVKYNEKFKGRVTITADTSTSTAYMELSSLRSEDTAVYYCAGSYYSYDVLDYWGQGTTVTVSS

SEQ ID NO: 186 - protein, 246 aa, Artificial Sequence
  source: /note="Description of Artificial Sequence: Synthetic polypeptide"
QVQLVQSGAEVKKPGSSVKVSCKASGTDFDKTYIHWVRQAPGQGLEWMGRISAGSGNVKYNEKFKGRVTITADTSTSTAYMELSSLRSEDTAVYYCAGSYYSYDVLDYWGQGTTVTVSSGGGGSGGGGSGGGGSGGGGSDIQMTQSPSFLSASVGDRVTITCKASQNVDDRVAWYQQKPGKAPKALIYSSSHRYKGVPSRFSGSGSGTEFTLTISSLQPEDFATYFCQQFKSYPLTFGQGTKLEIK

SEQ ID NO: 187 - protein, 107 aa, Artificial Sequence; identical to SEQ ID NO: 87
  source: /note="Description of Artificial Sequence: Synthetic polypeptide"

SEQ ID NO: 188 - protein, 119 aa, Artificial Sequence
  source: /note="Description of Artificial Sequence: Synthetic polypeptide"
QVQLVQSGAEVKKPGSSVKVSCKASGTDFDKTYIHWVRQAPGQGLEWMGRISAGSGNVKYNEKFKGRVTITADTSTSTAYMELSSLRSEDTAVYYCAGSYYSYDVLDYWGQGTTVTVSS

SEQ ID NO: 189 - protein, 246 aa, Artificial Sequence
  source: /note="Description of Artificial Sequence: Synthetic polypeptide"
QVQLVQSGAEVKKPGSSVKVSCKASGTDFDKIYIHWVRQAPGQGLEWMGRISAGSGNIKYNEKFKGRVTITADTSTSTAYMELSSLRSEDTAVYYCAGSYYSYDVLDYWGQGTTVTVSSGGGGSGGGGSGGGGSGGGGSDIQMTQSPSFLSASVGDRVTITCKASQNVDDRVAWYQQKPGKAPKALIYSSSHRYKGVPSRFSGSGSGTEFTLTISSLQPEDFATYFCQQFKSYPLTFGQGTKLEIK

SEQ ID NO: 190 - protein, 107 aa, Artificial Sequence; identical to SEQ ID NO: 87
  source: /note="Description of Artificial Sequence: Synthetic polypeptide"

SEQ ID NO: 191 - protein, 119 aa, Artificial Sequence
  source: /note="Description of Artificial Sequence: Synthetic polypeptide"
QVQLVQSGAEVKKPGSSVKVSCKASGTDFDKIYIHWVRQAPGQGLEWMGRISAGSGNIKYNEKFKGRVTITADTSTSTAYMELSSLRSEDTAVYYCAGSYYSYDVLDYWGQGTTVTVSS

SEQ ID NO: 192 - protein, 246 aa, Artificial Sequence
  source: /note="Description of Artificial Sequence: Synthetic polypeptide"
QVQLVQSGAEVKKPGSSVKVSCKASGTDFDKIYIHWVRQAPGQGLEWMGRISAGSGNVKYNEKFKGRVTITADTSTSTAYMELSSLRSEDTAVYYCAGSYYSYDVLDYWGQGTTVTVSSGGGGSGGGGSGGGGSGGGGSDIQMTQSPSFLSASVGDRVTITCKASQNVGDRVAWYQQKPGKAPKALIYSSSHRYKGVPSRFSGSGSGTEFTLTISSLQPEDFATYFCQQFKSYPLTFGQGTKLEIK

SEQ ID NO: 193 - protein, 107 aa, Artificial Sequence; identical to SEQ ID NO: 102
  source: /note="Description of Artificial Sequence: Synthetic polypeptide"

SEQ ID NO: 194 - protein, 119 aa, Artificial Sequence; identical to SEQ ID NO: 85
  source: /note="Description of Artificial Sequence: Synthetic polypeptide"

SEQ ID NO: 195 - protein, 246 aa, Artificial Sequence
  source: /note="Description of Artificial Sequence: Synthetic polypeptide"
QVQLVQSGAEVKKPGSSVKVSCKASGGTFKLTYIHWVRQAPGQGLEWMGRVSAGSGNVKYNEKFKGRVTITADTSTSTAYMELSSLRSEDTAVYYCAGSYYSYDVLDYWGQGTTVTVSSGGGGSGGGGSGGGGSGGGGSDIQMTQSPSFLSASVGDRVTITCKASQNVDDRVAWYQQKPGKAPKALIYSSSHRYKGVPSRFSGSGSGTEFTLTISSLQPEDFATYFCQQFKSYPLTFGQGTKLEIK

SEQ ID NO: 196 - protein, 107 aa, Artificial Sequence; identical to SEQ ID NO: 87
  source: /note="Description of Artificial Sequence: Synthetic polypeptide"

SEQ ID NO: 197 - protein, 119 aa, Artificial Sequence
  source: /note="Description of Artificial Sequence: Synthetic polypeptide"
QVQLVQSGAEVKKPGSSVKVSCKASGGTFKLTYIHWVRQAPGQGLEWMGRVSAGSGNVKYNEKFKGRVTITADTSTSTAYMELSSLRSEDTAVYYCAGSYYSYDVLDYWGQGTTVTVSS

SEQ ID NO: 198 - protein, 246 aa, Artificial Sequence
  source: /note="Description of Artificial Sequence: Synthetic polypeptide"
QVQLVQSGAEVKKPGSSVKVSCKASGTDFKLTYIHWVRQAPGQGLEWMGRISPGSGNVKYNEKFKGRVTITADTSTSTAYMELSSLRSEDTAVYYCAGSYYSYDVLDYWGQGTTVTVSSGGGGSGGGGSGGGGSGGGGSDIQMTQSPSFLSASVGDRVTITCKASQNVDNRVAWHQQKPGKAPKALIYSSSHRYKGVPSRFSGSGSGTEFTLTISSLQPEDFATYFCQQFKSYPLTFGQGTKLEIK

SEQ ID NO: 199 - protein, 107 aa, Artificial Sequence
  source: /note="Description of Artificial Sequence: Synthetic polypeptide"
DIQMTQSPSFLSASVGDRVTITCKASQNVDNRVAWHQQKPGKAPKALIYSSSHRYKGVPSRFSGSGSGTEFTLTISSLQPEDFATYFCQQFKSYPLTFGQGTKLEIK

SEQ ID NO: 200 - protein, 119 aa, Artificial Sequence
  source: /note="Description of Artificial Sequence: Synthetic polypeptide"
QVQLVQSGAEVKKPGSSVKVSCKASGTDFKLTYIHWVRQAPGQGLEWMGRISPGSGNVKYNEKFKGRVTITADTSTSTAYMELSSLRSEDTAVYYCAGSYYSYDVLDYWGQGTTVTVSS

SEQ ID NO: 201 - protein, 246 aa, Artificial Sequence
  source: /note="Description of Artificial Sequence: Synthetic polypeptide"
QVQLVQSGAEVKKPGSSVKVSCKASGHDFDKFYIHWVRQAPGQGLEWMGRVSAGSGNTKYNEKFKGRVTITADTSTSTAYMELSSLRSEDTAVYYCAGSYYSYDVLDYWGQGTTVTVSSGGGGSGGGGSGGGGSGGGGSDIQMTQSPSFLSASVGDRVTITCKASQNVDNRVAWYQQKPGKAPKALIYSSSHRYKGVPSRFSGSGSGTEFTLTISSLQPEDFATYFCQQFKSYPLTFGQGTKLEIK

SEQ ID NO: 202 - protein, 107 aa, Artificial Sequence; identical to SEQ ID NO: 90
  source: /note="Description of Artificial Sequence: Synthetic polypeptide"

SEQ ID NO: 203 - protein, 119 aa, Artificial Sequence
  source: /note="Description of Artificial Sequence: Synthetic polypeptide"
QVQLVQSGAEVKKPGSSVKVSCKASGHDFDKFYIHWVRQAPGQGLEWMGRVSAGSGNTKYNEKFKGRVTITADTSTSTAYMELSSLRSEDTAVYYCAGSYYSYDVLDYWGQGTTVTVSS

SEQ ID NO: 204 - protein, 246 aa, Artificial Sequence
  source: /note="Description of Artificial Sequence: Synthetic polypeptide"
QVQLVQSGAEVKKPGSSVKVSCKASGTDFDKFYIHWVRQAPGQGLEWMGRVSAGSGNVKYNEKFKGRVTITADTSTSTAYMELSSLRSEDTAVYYCAGSYYSYDVLDYWGQGTTVTVSSGGGGSGGGGSGGGGSGGGGSDIQMTQSPSFLSASVGDRVTITCKASQNVGDRVVWYQQKPGKAPKALIYSSSHRYKGVPSRFSGSGSGTEFTLTISSLQPEDFATYFCQQFKSYPLTFGQGTKLEIK

SEQ ID NO: 205 - protein, 119 aa, Artificial Sequence
  source: /note="Description of Artificial Sequence: Synthetic polypeptide"
QVQLVQSGAEVKKPGSSVKVSCKASGTDFDKFYIHWVRQAPGQGLEWMGRVSAGSGNVKYNEKFKGRVTITADTSTSTAYMELSSLRSEDTAVYYCAGSYYSYDVLDYWGQGTTVTVSS

SEQ ID NO: 206 - protein, 246 aa, Artificial Sequence
  source: /note="Description of Artificial Sequence: Synthetic polypeptide"
QVQLVQSGAEVKKPGSSVKVSCKASGYSFTTYYIHWVRQAPGQGLEWMGWFSAGSGNTKYNEKFKGRVTITADTSTSTAYMELSSLRSEDTAVYYCAVSYYSYDVLDYWGQGTTVTVSSGGGGSGGGGSGGGGSGGGGSDIQMTQSPSFLSASVGDRVTITCKASQNVGINVVWHQQKPGKAPKALIYSSSHRYSGVPSRFSGSGSGTEFTLTISSLQPEDFATYFCQQFKSYPLTFGQGTKLEIK

SEQ ID NO: 207 - protein, 119 aa, Artificial Sequence
  source: /note="Description of Artificial Sequence: Synthetic polypeptide"
QVQLVQSGAEVKKPGSSVKVSCKASGYSFTTYYIHWVRQAPGQGLEWMGWFSAGSGNTKYNEKFKGRVTITADTSTSTAYMELSSLRSEDTAVYYCAVSYYSYDVLDYWGQGTTVTVSS

SEQ ID NO: 208 - protein, 246 aa, Artificial Sequence
  source: /note="Description of Artificial Sequence: Synthetic polypeptide"
QVQLVQSGAEVKKPGSSVKVSCKASGYSFTTYYIHWVRQAPGQGLEWMGWFSAGSGNTKYNEKFKGRVTITADTSTSTAYMELSSLRSEDTAVYYCAGSYYSYDVLDYWGQGTTVTVSSGGGGSGGGGSGGGGSGGGGSDIQMTQSPSFLSASVGDRVTITCKASQNVGINVVWHQQKPGKAPKALIYSSSHRYSGVPSRFSGSGSGTEFTLTISSLQPEDFATYFCQQFKSYPLTFGQGTKLEIK

SEQ ID NO: 209 - protein, 119 aa, Artificial Sequence
  source: /note="Description of Artificial Sequence: Synthetic polypeptide"
QVQLVQSGAEVKKPGSSVKVSCKASGYSFTTYYIHWVRQAPGQGLEWMGWFSAGSGNTKYNEKFKGRVTITADTSTSTAYMELSSLRSEDTAVYYCAGSYYSYDVLDYWGQGTTVTVSS

SEQ ID NO: 210 - protein, 246 aa, Artificial Sequence
  source: /note="Description of Artificial Sequence: Synthetic polypeptide"
QVQLVQSGAEVKKPGSSVKVSCKASGYSFTTYYIHWVRQAPGQGLEWMGWFFPGSGNTKYNEKFKGRVTITADTSTSTAYMELSSLRSEDTAVYYCAGSYYSYDVLDYWGQGTTVTVSSGGGGSGGGGSGGGGSGGGGSDIQMTQSPSFLSASVGDRVTITCKASQNVGINVVWHQQKPGKAPKALIYSSSHRYSGVPSRFSGSGSGTEFTLTISSLQPEDFATYFCQQFKSYPLTFGQGTKLEIK

SEQ ID NO: 211 - protein, 119 aa, Artificial Sequence
  source: /note="Description of Artificial Sequence: Synthetic polypeptide"
QVQLVQSGAEVKKPGSSVKVSCKASGYSFTTYYIHWVRQAPGQGLEWMGWFFPGSGNTKYNEKFKGRVTITADTSTSTAYMELSSLRSEDTAVYYCAGSYYSYDVLDYWGQGTTVTVSS

SEQ ID NO: 212 - protein, 246 aa, Artificial Sequence
  source: /note="Description of Artificial Sequence: Synthetic polypeptide"
QVQLVQSGAEVKKPGSSVKVSCKASGYSFTTYYIHWVRQAPGQGLEWMGWFSPGSGNTKYNEKFKGRVTITADTSTSTAYMELSSLRSEDTAVYYCAVSYYSYDVLDYWGQGTTVTVSSGGGGSGGGGSGGGGSGGGGSDIQMTQSPSFLSASVGDRVTITCKASQNVGINVVWHQQKPGKAPKALIYSSSHRYSGVPSRFSGSGSGTEFTLTISSLQPEDFATYFCQQFKSYPLTFGQGTKLEIK

SEQ ID NO: 213 - protein, 119 aa, Artificial Sequence
  source: /note="Description of Artificial Sequence: Synthetic polypeptide"
QVQLVQSGAEVKKPGSSVKVSCKASGYSFTTYYIHWVRQAPGQGLEWMGWFSPGSGNTKYNEKFKGRVTITADTSTSTAYMELSSLRSEDTAVYYCAVSYYSYDVLDYWGQGTTVTVSS

SEQ ID NO: 214 - protein, 246 aa, Artificial Sequence
  source: /note="Description of Artificial Sequence: Synthetic polypeptide"
QVQLVQSGAEVKKPGSSVKVSCKASGYSFTTYYIHWVRQAPGQGLEWMGWFSPGSGNTKYNEKFKGRVTITADTSTSTAYMELSSLRSEDTAVYYCAGSYYSYDVLDYWGQGTTVTVSSGGGGSGGGGSGGGGSGGGGSDIQMTQSPSFLSASVGDRVTITCKASQNVGINVVWHQQKPGKAPKALIYSSSHRYSGVPSRFSGSGSGTEFTLTISSLQPEDFATYFCQQFKSYPLTFGQGTKLEIK

SEQ ID NO: 215 - protein, 119 aa, Artificial Sequence
  source: /note="Description of Artificial Sequence: Synthetic polypeptide"
QVQLVQSGAEVKKPGSSVKVSCKASGYSFTTYYIHWVRQAPGQGLEWMGWFSPGSGNTKYNEKFKGRVTITADTSTSTAYMELSSLRSEDTAVYYCAGSYYSYDVLDYWGQGTTVTVSS

SEQ ID NO: 216 - protein, 246 aa, Artificial Sequence
  source: /note="Description of Artificial Sequence: Synthetic polypeptide"
QVQLVQSGAEVKKPGSSVKVSCKASGYSFTTYYIHWVRQAPGQGLEWMGRIFPGSGNIKYNEKFKGRVTITADTSTSTAYMELSSLRSEDTAVYYCAGSYYSYDVLDYWGQGTTVTVSSGGGGSGGGGSGGGGSGGGGSDIQMTQSPSFLSASVGDRVTITCKASQNVGINVVWHQQKPGKAPKALIYSSSHRYSGVPSRFSGSGSGTEFTLTISSLQPEDFATYFCQQFKSYPLTFGQGTKLEIK

SEQ ID NO: 217 - protein, 119 aa, Artificial Sequence
  source: /note="Description of Artificial Sequence: Synthetic polypeptide"
QVQLVQSGAEVKKPGSSVKVSCKASGYSFTTYYIHWVRQAPGQGLEWMGRIFPGSGNIKYNEKFKGRVTITADTSTSTAYMELSSLRSEDTAVYYCAGSYYSYDVLDYWGQGTTVTVSS

SEQ ID NO: 218 - protein, 246 aa, Artificial Sequence
  source: /note="Description of Artificial Sequence: Synthetic polypeptide"
QVQLVQSGAEVKKPGSSVKVSCKASGYSFTTYYIHWVRQAPGQGLEWMGWFFPGSGNIKYNEKFKGRVTITADTSTSTAYMELSSLRSEDTAVYYCAGSIYSAGVLDYWGQGTTVTVSSGGGGSGGGGSGGGGSGGGGSDIQMTQSPSFLSASVGDRVTITCKASQNVGINVVWHQQKPGKAPKALIYSSSHRYSGVPSRFSGSGSGTEFTLTISSLQPEDFATYFCQQFKSYPLTFGQGTKLEIK

SEQ ID NO: 219 - protein, 119 aa, Artificial Sequence
  source: /note="Description of Artificial Sequence: Synthetic polypeptide"
QVQLVQSGAEVKKPGSSVKVSCKASGYSFTTYYIHWVRQAPGQGLEWMGWFFPGSGNIKYNEKFKGRVTITADTSTSTAYMELSSLRSEDTAVYYCAGSIYSAGVLDYWGQGTTVTVSS

SEQ ID NO: 220 - protein, 246 aa, Artificial Sequence
  source: /note="Description of Artificial Sequence: Synthetic polypeptide"
QVQLVQSGAEVKKPGSSVKVSCKASGYSFTLGYIHWVRQAPGQGLEWMGWFFPGSGNIKYNEKFKGRVTITADTSTSTAYMELSSLRSEDTAVYYCAGSYYSYDVLDYWGQGTTVTVSSGGGGSGGGGSGGGGSGGGGSDIQMTQSPSFLSASVGDRVTITCKASQNVGINVVWHQQKPGKAPKALIYSSSHRYSGVPSRFSGSGSGTEFTLTISSLQPEDFATYFCQQFKSYPLTFGQGTKLEIK

SEQ ID NO: 221 - protein, 119 aa, Artificial Sequence
  source: /note="Description of Artificial Sequence: Synthetic polypeptide"
QVQLVQSGAEVKKPGSSVKVSCKASGYSFTLGYIHWVRQAPGQGLEWMGWFFPGSGNIKYNEKFKGRVTITADTSTSTAYMELSSLRSEDTAVYYCAGSYYSYDVLDYWGQGTTVTVSS

SEQ ID NO: 222 - protein, 246 aa, Artificial Sequence
  source: /note="Description of Artificial Sequence: Synthetic polypeptide"
QVQLVQSGAEVKKPGSSVKVSCKASGYSFRLTYIHWVRQAPGQGLEWMGWFFPGSGNIKYNEKFKGRVTITADTSTSTAYMELSSLRSEDTAVYYCAGSYYSYDVLDYWGQGTTVTVSSGGGGSGGGGSGGGGSGGGGSDIQMTQSPSFLSASVGDRVTITCKASQNVGINVVWHQQKPGKAPKALIYSSSHRYSGVPSRFSGSGSGTEFTLTISSLQPEDFATYFCQQFKSYPLTFGQGTKLEIK

SEQ ID NO: 223 - protein, 119 aa, Artificial Sequence
  source: /note="Description of Artificial Sequence: Synthetic polypeptide"
QVQLVQSGAEVKKPGSSVKVSCKASGYSFRLTYIHWVRQAPGQGLEWMGWFFPGSGNIKYNEKFKGRVTITADTSTSTAYMELSSLRSEDTAVYYCAGSYYSYDVLDYWGQGTTVTVSS

SEQ ID NO: 224 - protein, 246 aa, Artificial Sequence
  source: /note="Description of Artificial Sequence: Synthetic polypeptide"
QVQLVQSGAEVKKPGSSVKVSCKASGYSFHNWYIHWVRQAPGQGLEWMGWFFPGSGNIKYNEKFKGRVTITADTSTSTAYMELSSLRSEDTAVYYCAGSYYSYDVLDYWGQGTTVTVSSGGGGSGGGGSGGGGSGGGGSDIQMTQSPSFLSASVGDRVTITCKASQNVGINVVWHQQKPGKAPKALIYSSSHRYSGVPSRFSGSGSGTEFTLTISSLQPEDFATYFCQQFKSYPLTFGQGTKLEIK

SEQ ID NO: 225 - protein, 119 aa, Artificial Sequence
  source: /note="Description of Artificial Sequence: Synthetic polypeptide"
QVQLVQSGAEVKKPGSSVKVSCKASGYSFHNWYIHWVRQAPGQGLEWMGWFFPGSGNIKYNEKFKGRVTITADTSTSTAYMELSSLRSEDTAVYYCAGSYYSYDVLDYWGQGTTVTVSS

SEQ ID NO: 226-229 - skipped (4 entries)

SEQ ID NO: 230 - protein, 107 aa, Artificial Sequence; identical to SEQ ID NO: 108
  source: /note="Description of Artificial Sequence: Synthetic polypeptide"
  VARIANT (30)..(30): /replace="Glu" or "Ala" or "Asp"
  VARIANT (31)..(31): /replace="Asp"
  VARIANT (32)..(32): /replace="Lys"
  VARIANT (36)..(36): /replace="His"
  VARIANT (56)..(56): /replace="Ser"
  SITE (1)..(107): /note="Variant residues given in the sequence have no preference with respect to those in the annotations for variant positions"

SEQ ID NO: 231 - protein, 119 aa, Artificial Sequence; identical to SEQ ID NO: 148
  source: /note="Description of Artificial Sequence: Synthetic polypeptide"
  VARIANT (27)..(27): /replace="Thr" or "Gly" or "Tyr"
  VARIANT (28)..(28): /replace="Thr" or "Ser"
  VARIANT (30)..(30): /replace="Arg" or "Asp" or "Lys" or "Thr"
  VARIANT (31)..(31): /replace="Asp" or "Lys" or "Thr" or "Asn"
  VARIANT (32)..(32): /replace="Phe" or "Thr" or "Ile" or "Tyr" or "Gly"
  VARIANT (50)..(50): /replace="Trp"
  VARIANT (51)..(51): /replace="Ile" or "Phe"
  VARIANT (52)..(52): /replace="Ser" or "Tyr"
  VARIANT (53)..(53): /replace="Pro"
  VARIANT (57)..(57): /replace="Ser"
  VARIANT (58)..(58): /replace="Val" or "Tyr" or "Ile"
  VARIANT (59)..(59): /replace="Arg"
  VARIANT (98)..(98): /replace="Val"
  VARIANT (100)..(100): /replace="Ile"
  VARIANT (103)..(103): /replace="Ala"
  VARIANT (104)..(104): /replace="Gly"
  SITE (1)..(119): /note="Variant residues given in the sequence have no preference with respect to those in the annotations for variant positions"

SEQ ID NO: 232 - protein, 107 aa, Artificial Sequence
  source: /note="Description of Artificial Sequence: Synthetic polypeptide"
DIQMTQTTSSLSASLGDRVTISCSASQGISNYLNWYQQKPDGTVKLLIYYTSSLHSGVPSRFSGSGSGTDYSLTISNLEPEDIATYYCQQYSKLPRTFGGGTKVEIK

SEQ ID NO: 233 - protein, 120 aa, Artificial Sequence
  source: /note="Description of Artificial Sequence: Synthetic polypeptide"
QVQLKESGPGLVAPSQSLSITCTVSGFSLTAYGVNWVRQPPGKGLEWLGMIWGDGNTDYNSALKSRLSISKDNSKSQVFLKMNSLQTDDTARYYCARDRVTATLYAMDYWGQGTSVTVSS

SEQ ID NO: 234-1099 - skipped (866 entries)

SEQ ID NO: 1100 - protein, 119 aa, Artificial Sequence; identical to SEQ ID NO: 9
  source: /note="Description of Artificial Sequence: Synthetic polypeptide"

SEQ ID NO: 1101 - protein, 106 aa, Artificial Sequence
  source: /note="Description of Artificial Sequence: Synthetic polypeptide"
QSVLTQPPSVSEAPRQRVTISCKASQNVGINVVWHQQLPGKAPKALIYSSSHRYSGVSDRFSGSGSGTSFSLAISGLQSEDEADYFCQQFKSYPLTFGTGTKVTVL

SEQ ID NO: 1102 - protein, 5 aa, Artificial Sequence
  source: /note="Description of Artificial Sequence: Synthetic peptide"
SAYMH

SEQ ID NO: 1103 - protein, 17 aa, Artificial Sequence
  source: /note="Description of Artificial Sequence: Synthetic peptide"
RIDPATGKTKYAPKFQA

SEQ ID NO: 1104 - protein, 10 aa, Artificial Sequence
  source: /note="Description of Artificial Sequence: Synthetic peptide"
SLNWDYGLDY

SEQ ID NO: 1105 - protein, 7 aa, Artificial Sequence
  source: /note="Description of Artificial Sequence: Synthetic peptide"
GFNIKSA

SEQ ID NO: 1106 - protein, 6 aa, Artificial Sequence
  source: /note="Description of Artificial Sequence: Synthetic peptide"
DPATGK

SEQ ID NO: 1107 - protein, 15 aa, Artificial Sequence
  source: /note="Description of Artificial Sequence: Synthetic peptide"
RASKSVSILGTHLIH

SEQ ID NO: 1108 - protein, 7 aa, Artificial Sequence
  source: /note="Description of Artificial Sequence: Synthetic peptide"
AASNLES

SEQ ID NO: 1109 - protein, 9 aa, Artificial Sequence
  source: /note="Description of Artificial Sequence: Synthetic peptide"
QQSIEDPWT

SEQ ID NO: 1110 - protein, 11 aa, Artificial Sequence
  source: /note="Description of Artificial Sequence: Synthetic peptide"
SKSVSILGTHL

SEQ ID NO: 1111 - protein, 111 aa, Artificial Sequence
  source: /note="Description of Artificial Sequence: Synthetic polypeptide"
DIVLTQSPASLAVSLGQRATISCRASKSVSILGTHLIHWYQQKPGQPPKLLIYAASNLESGVPARFSGSGSETVFTLNIHPVEEEDAATYFCQQSIEDPWTFGGGTKLGIK

SEQ ID NO: 1112 - protein, 119 aa, Artificial Sequence
  source: /note="Description of Artificial Sequence: Synthetic polypeptide"
EVQLQQSVADLVRPGASLKLSCTASGFNIKSAYMHWVIQRPDQGPECLGRIDPATGKTKYAPKFQAKATITADTSSNTAYLQLSSLTSEDTAIYYCTRSLNWDYGLDYWGQGTSVTVSS

SEQ ID NO: 1113 - protein, 119 aa, Artificial Sequence
  source: /note="Description of Artificial Sequence: Synthetic polypeptide"
QVQLVQSGAEVKKPGASVKVSCKASGFNIKSAYMHWVRQAPGQGLEWMGRIDPATGKTKYAPKFQARVTMTADTSTNTAYMELSSLRSEDTAVYYCARSLNWDYGLDYWGQGTLVTVSS

SEQ ID NO: 1114 - protein, 119 aa, Artificial Sequence
  source: /note="Description of Artificial Sequence: Synthetic polypeptide"
QVQLVQSGAEVKKPGASVKVSCKASGFNIKSAYMHWVRQAPGQEPGCMGRIDPATGKTKYAPKFQARVTMTADTSINTAYTELSSLRSEDTATYYCARSLNWDYGLDYWGQGTLVTVSS

SEQ ID NO: 1115 - protein, 119 aa, Artificial Sequence
  source: /note="Description of Artificial Sequence: Synthetic polypeptide"
QVQLVQSGAEVKKPGSSVKVSCKASGFNIKSAYMHWVRQAPGQGLEWMGRIDPATGKTKYAPKFQARVTITADTSTNTAYMELSSLRSEDTAVYYCARSLNWDYGLDYWGQGTLVTVSS

SEQ ID NO: 1116 - protein, 119 aa, Artificial Sequence
  source: /note="Description of Artificial Sequence: Synthetic polypeptide"
QVQLVQSGAEVKKPGASVKVSCKASGFNIKSAYMHWVRQAPGQRLEWMGRIDPATGKTKYAPKFQARVTITADTSANTAYMELSSLRSEDTAVYYCARSLNWDYGLDYWGQGTLVTVSS

SEQ ID NO: 1117 - protein, 109 aa, Artificial Sequence
  source: /note="Description of Artificial Sequence: Synthetic polypeptide"
EIVLTQSPATLSLSPGERATLSCRASKSVSILGTHLIHWYQQKPGQAPRLLIYAASNLESGIPARFSGSGSETDFTLTISSLEPEDFAVYFCQQSIEDPFGGGTKVEIK

SEQ ID NO: 1118 - protein, 109 aa, Artificial Sequence
  source: /note="Description of Artificial Sequence: Synthetic polypeptide"
EIVLTQSPATLSLSPGERATLSCRASKSVSILGTHLIHWYQQKPGLAPRLLIYAASNLESGIPDRFSGSGSETDFTLTISRLEPEDFAVYFCQQSIEDPFGGGTKVEIK

SEQ ID NO: 1119 - protein, 109 aa, Artificial Sequence
  source: /note="Description of Artificial Sequence: Synthetic polypeptide"
EIVLTQSPGTLSLSPGERATLSCRASKSVSILGTHLIHWYQQKPGQAPRLLIYAASNLESGIPDRFSGSGSETDFTLTISRLEPEDFAVYFCQQSIEDPFGGGTKVEIK

SEQ ID NO: 1120 - protein, 5 aa, Artificial Sequence
  source: /note="Description of Artificial Sequence: Synthetic peptide"
DTYMY

SEQ ID NO: 1121 - protein, 17 aa, Artificial Sequence
  source: /note="Description of Artificial Sequence: Synthetic peptide"
RIDPANGNTKYDPKFQD

SEQ ID NO: 1122 - protein, 9 aa, Artificial Sequence
  source: /note="Description of Artificial Sequence: Synthetic peptide"
GSYYYAMDY

SEQ ID NO: 1123 - protein, 7 aa, Artificial Sequence
  source: /note="Description of Artificial Sequence: Synthetic peptide"
GFKTEDT

SEQ ID NO: 1124 - protein, 6 aa, Artificial Sequence
  source: /note="Description of Artificial Sequence: Synthetic peptide"
DPANGN

SEQ ID NO: 1125 - protein, 10 aa, Artificial Sequence
  source: /note="Description of Artificial Sequence: Synthetic peptide"
GFKTEDTYMY

SEQ ID NO: 1126 - protein, 15 aa, Artificial Sequence
  source: /note="Description of Artificial Sequence: Synthetic peptide"
RASESVDSYGNSFMH

SEQ ID NO: 1127 - protein, 7 aa, Artificial Sequence
  source: /note="Description of Artificial Sequence: Synthetic peptide"
RASNLES

SEQ ID NO: 1128 - protein, 9 aa, Artificial Sequence
  source: /note="Description of Artificial Sequence: Synthetic peptide"
QQSNEDPYT

SEQ ID NO: 1129 - protein, 111 aa, Artificial Sequence
  source: /note="Description of Artificial Sequence: Synthetic polypeptide"
DIVLTQSPASLAVSLGQRATISCRASESVDSYGNSFMHWYQQKPGQPPKLLIYRASNLESGIPARFSGSGSRTDFTLTINPVEADDVATYYCQQSNEDPYTFGGGTKLEIK

SEQ ID NO: 1130 - protein, 118 aa, Artificial Sequence
  source: /note="Description of Artificial Sequence: Synthetic polypeptide"
EVQLQQSGAELVKPGASVKLSCTASGFKTEDTYMYWVKQRPEQGLEWIGRIDPANGNTKYDPKFQDKATITADSSSNTAYLQLSSLPSEDTAVYYCARGSYYYAMDYWGQGTSVTVSS

SEQ ID NO: 1131 - protein, 118 aa, Artificial Sequence
  source: /note="Description of Artificial Sequence: Synthetic polypeptide"
QVQLVQSGAEVKKPGSSVKVSCKASGFKTEDTYMYWVRQAPGQGLEWIGRIDPANGNTKYDPKFQDRATITADSSTNTAYMELSSLRSEDTAVYYCARGSYYYAMDYWGQGTLVTVSS

SEQ ID NO: 1132 - protein, 118 aa, Artificial Sequence
  source: /note="Description of Artificial Sequence: Synthetic polypeptide"
QVQLVQSGAEVKKPGASVKVSCKASGFKTEDTYMYWVRQAPGQRLEWIGRIDPANGNTKYDPKFQDRATITADSSANTAYMELSSLRSEDTAVYYCARGSYYYAMDYWGQGTLVTVSS

SEQ ID NO: 1133 - protein, 118 aa, Artificial Sequence
  source: /note="Description of Artificial Sequence: Synthetic polypeptide"
EVQLVESGGGLVQPGGSLKLSCAASGFKTEDTYMYWVRQASGKGLEWIGRIDPANGNTKYDPKFQDRATISADSSKNTAYLQMNSLKTEDTAVYYCARGSYYYAMDYWGQGTLVTVSS

SEQ ID NO: 1134 - protein, 118 aa, Artificial Sequence
  source: /note="Description of Artificial Sequence: Synthetic polypeptide"
EVQLVQSGAEVKKPGESLRISCKASGFKTEDTYMYWVRQMPGKGLEWIGRIDPANGNTKYDPKFQDQATISADSSINTAYLQWSSLKASDTAMYYCARGSYYYAMDYWGQGTLVTVSS

SEQ ID NO: 1135 - protein, 118 aa, Artificial Sequence
  source: /note="Description of Artificial Sequence: Synthetic polypeptide"
QVQLVQSGSELKKPGASVKVSCKASGFKTEDTYMYWVRQAPGQGLEWIGRIDPANGNTKYDPKFQDRAVISADSSVNTAYLQISSLKAEDTAVYYCARGSYYYAMDYWGQGTLVTVSS

SEQ ID NO: 1136 - protein, 111 aa, Artificial Sequence
  source: /note="Description of Artificial Sequence: Synthetic polypeptide"
DIVLTQSPDSLAVSLGERATINCRASESVDSYGNSFMHWYQQKPGQPPKLLIYRASNLESGVPDRFSGSGSRTDFTLTISSLQAEDVAVYYCQQSNEDPYTFGQGTKLEIK

SEQ ID NO: 1137 - protein, 111 aa, Artificial Sequence
  source: /note="Description of Artificial Sequence: Synthetic polypeptide"
EIVLTQSPATLSLSPGERATLSCRASESVDSYGNSFMHWYQQKPGQAPKLLIYRASNLESGIPARFSGSGSRTDFTLTISRLEPEDFAVYYCQQSNEDPYTFGQGTKLEIK

SEQ ID NO: 1138 - protein, 111 aa, Artificial Sequence
  source: /note="Description of Artificial Sequence: Synthetic polypeptide"
DIQLTQSPSSLSASVGDRVTITCRASESVDSYGNSFMHWYQQKPGQAPKLLIYRASNLESGVPSRFSGSGSRTDFTLTISSLQPEDVATYYCQQSNEDPYTFGQGTKLEIK

SEQ ID NO: 1139 - protein, 111 aa, Artificial Sequence
  source: /note="Description of Artificial Sequence: Synthetic polypeptide"
AIQLTQSPSSLSASVGDRVTITCRASESVDSYGNSFMHWYQQKPGKAPKLLIYRASNLESGVPSRFSGSGSRTDFTLTISSLQPEDFATYYCQQSNEDPYTFGQGTKLEIK

SEQ ID NO: 1140 - protein, 111 aa, Artificial Sequence
  source: /note="Description of Artificial Sequence: Synthetic polypeptide"
EIVLTQSPDFQSVTPKEKVTITCRASESVDSYGNSFMHWYQQKPDQSPKLLIYRASNLESGVPSRFSGSGSRTDFTLTINSLEAEDAATYYCQQSNEDPYTFGQGTKLEIK

SEQ ID NO: 1141 - protein, 5 aa, Artificial Sequence
  source: /note="Description of Artificial Sequence: Synthetic peptide"
SYAMS

SEQ ID NO: 1142 - protein, 17 aa, Artificial Sequence
  source: /note="Description of Artificial Sequence: Synthetic peptide"
HISNGGDYIYYADTVKG

SEQ ID NO: 1143 - protein, 12 aa, Artificial Sequence
  source: /note="Description of Artificial Sequence: Synthetic peptide"
PSYYSDPWFFDV

SEQ ID NO: 1144 - protein, 7 aa, Artificial Sequence
  source: /note="Description of Artificial Sequence: Synthetic peptide"
GFTFRSY

SEQ ID NO: 1145 - protein, 6 aa, Artificial Sequence
  source: /note="Description of Artificial Sequence: Synthetic peptide"
SNGGDY

SEQ ID NO: 1146 - protein, 10 aa, Artificial Sequence
  source: /note="Description of Artificial Sequence: Synthetic peptide"
GFTFRSYAMS

SEQ ID NO: 1147 - protein, 10 aa, Artificial Sequence
  source: /note="Description of Artificial Sequence: Synthetic peptide"
SAGSSVSFMH

SEQ ID NO: 1148 - protein, 7 aa, Artificial Sequence
  source: /note="Description of Artificial Sequence: Synthetic peptide"
DTSKLAS

SEQ ID NO: 1149 - protein, 9 aa, Artificial Sequence
  source: /note="Description of Artificial Sequence: Synthetic peptide"
LQGSGFPLT

SEQ ID NO: 1150 - protein, 6 aa, Artificial Sequence
  source: /note="Description of Artificial Sequence: Synthetic peptide"
GSSVSF

SEQ ID NO: 1151 - protein, 106 aa, Artificial Sequence
  source: /note="Description of Artificial Sequence: Synthetic polypeptide"
ENVLTQSPAIMSASPGEKVTMTCSAGSSVSFMHWYQQKSSTSPKLWIYDTSKLASGVPGRFSGSGSGNSFSLTISSMEAEDVAIYYCLQGSGFPLTFGSGTKLEIK

SEQ ID NO: 1152 - protein, 121 aa, Artificial Sequence
  source: /note="Description of Artificial Sequence: Synthetic polypeptide"
DVKLVESGEGLVKPGGSLKLSCAASGFTFRSYAMSWVRQTPEKRLEWVAHISNGGDYIYYADTVKGRFTISRDNARNTLYLQMSSLKSEDTAMYYCTRPSYYSDPWFFDVWGTGTTVTVSS

SEQ ID NO: 1153 - protein, 121 aa, Artificial Sequence
  source: /note="Description of Artificial Sequence: Synthetic polypeptide"
EVQLVESGGGLVQPGGSLRLSCAASGFTFRSYAMSWVRQAPGKGLEWVAHISNGGDYIYYADTVKGRFTISRDNAKNSLYLQMNSLRAEDTAVYYCTRPSYYSDPWFFDVWGQGTTVTVSS

SEQ ID NO: 1154 - protein, 121 aa, Artificial Sequence
  source: /note="Description of Artificial Sequence: Synthetic polypeptide"
QVQLVESGGGVVQPGRSLRLSCAASGFTFRSYAMSWVRQAPGKGLEWVAHISNGGDYIYYADTVKGRFTISRDNSKNTLYLQMSSLRAEDTAVYYCTRPSYYSDPWFFDVWGQGTTVTVSS

SEQ ID NO: 1155 - protein, 121 aa, Artificial Sequence
  source: /note="Description of Artificial Sequence: Synthetic polypeptide"
EVQLVESGGGLVQPGGSLRLSCAASGFTFRSYAMSWVRQAPGKGLEWVAHISNGGDYIYYADTVKGRFTISRDNSKNTLYLQMNSLRAEDTAVYYCTRPSYYSDPWFFDVWGQGTTVTVSS

SEQ ID NO: 1156 - protein, 121 aa, Artificial Sequence
  source: /note="Description of Artificial Sequence: Synthetic polypeptide"
QVQLVQSGSELKKPGASVKVSCKASGFTFRSYAMSWVRQAPGQGLEWVAHISNGGDYIYYADTVKGRFVISRDNSVNTLYLQISSLKAEDTAVYYCTRPSYYSDPWFFDVWGQGTTVTVSS

SEQ ID NO: 1157 - protein, 121 aa, Artificial Sequence
  source: /note="Description of Artificial Sequence: Synthetic polypeptide"
QVQLVQSGAEVKKPGASVKVSCKASGFTFRSYAMSWVRQAPGQRLEWVAHISNGGDYIYYADTVKGRFTITRDNSANTLYMELSSLRSEDTAVYYCTRPSYYSDPWFFDVWGQGTTVTVSS

SEQ ID NO: 1158 - protein, 106 aa, Artificial Sequence
  source: /note="Description of Artificial Sequence: Synthetic polypeptide"
ENVLTQSPATLSLSPGERATLSCSAGSSVSFMHWYQQKPGQAPKLLIYDTSKLASGIPARFSGSGSGNDFTLTISSLEPEDFAVYYCLQGSGFPLTFGQGTKLEIK

SEQ ID NO: 1159 - protein, 106 aa, Artificial Sequence
  source: /note="Description of Artificial Sequence: Synthetic polypeptide"
ENVLTQSPDFQSVTPKEKVTITCSAGSSVSFMHWYQQKPDQSPKLLIYDTSKLASGVPSRFSGSGSGNDFTLTINSLEAEDAATYYCLQGSGFPLTFGQGTKLEIK

SEQ ID NO: 1160 - protein, 106 aa, Artificial Sequence
  source: /note="Description of Artificial Sequence: Synthetic polypeptide"
DNQLTQSPSSLSASVGDRVTITCSAGSSVSFMHWYQQKPGKVPKLLIYDTSKLASGVPSRFSGSGSGNDFTLTISSLQPEDVATYYCLQGSGFPLTFGQGTKLEIK

SEQ ID NO: 1161 - protein, 106 aa, Artificial Sequence
  source: /note="Description of Artificial Sequence: Synthetic polypeptide"
ANQLTQSPSSLSASVGDRVTITCSAGSSVSFMHWYQQKPGKAPKLLIYDTSKLASGVPSRFSGSGSGNDFTLTISSLQPEDFATYYCLQGSGFPLTFGQGTKLEIK

SEQ ID NO: 1162 - protein, 106 aa, Artificial Sequence
  source: /note="Description of Artificial Sequence: Synthetic polypeptide"
DNVLTQSPDSLAVSLGERATINCSAGSSVSFMHWYQQKPGQPPKLLIYDTSKLASGVPDRFSGSGSGNDFTLTISSLQAEDVAVYYCLQGSGFPLTFGQGTKLEIK

SEQ ID NO: 1163 - protein, 5 aa, Artificial Sequence
  source: /note="Description of Artificial Sequence: Synthetic peptide"
DYNIH

SEQ ID NO: 1164 - protein, 17 aa, Artificial Sequence
  source: /note="Description of Artificial Sequence: Synthetic peptide"
YINPYNGRTGYNQKFKA

SEQ ID NO: 1165 - protein, 9 aa, Artificial Sequence
  source: /note="Description of Artificial Sequence: Synthetic peptide"
WDGSSYFDY

SEQ ID NO: 1166 - protein, 10 aa, Artificial Sequence
  source: /note="Description of Artificial Sequence: Synthetic peptide"
GYTFTDYNIH

SEQ ID NO: 1167 - protein, 6 aa, Artificial Sequence
  source: /note="Description of Artificial Sequence: Synthetic peptide"
NPYNGR

SEQ ID NO: 1168 - protein, 10 aa, Artificial Sequence
  source: /note="Description of Artificial Sequence: Synthetic peptide"
SASSSVSYMH

SEQ ID NO: 1169 - protein, 7 aa, Artificial Sequence
  source: /note="Description of Artificial Sequence: Synthetic peptide"
EISKLAS

SEQ ID NO: 1170 - protein, 9 aa, Artificial Sequence
  source: /note="Description of Artificial Sequence: Synthetic peptide"
QQWNYPLLT

SEQ ID NO: 1171 - protein, 106 aa, Artificial Sequence
  source: /note="Description of Artificial Sequence: Synthetic polypeptide"
EIVLTQSPAITAASLGQKVTITCSASSSVSYMHWYQQKSGTSPKPWIYEISKLASGVPARFSGSGSGTSYSLTISSMEAEDAAIYYCQQWNYPLLTFGAGTKLELK

SEQ ID NO: 1172 - protein, 118 aa, Artificial Sequence
  source: /note="Description of Artificial Sequence: Synthetic polypeptide"
EVQLQQSGPVLVKPGASVRMSCKASGYTFTDYNIHWVKQSHGRSLEWVGYINPYNGRTGYNQKFKAKATLTVDKSSSTAYMDLRSLTSEDSAVYYCARWDGSSYFDYWGQGTTLTVSS

SEQ ID NO: 1173 - protein, 118 aa, Artificial Sequence
  source: /note="Description of Artificial Sequence: Synthetic polypeptide"
QVQLVQSGAEVKKPGSSVKVSCKASGYTFTDYNIHWVRQAPGQGLEWVGYINPYNGRTGYNQKFKARATLTVDKSTSTAYMELSSLRSEDTAVYYCARWDGSSYFDYWGQGTTVTVSS

SEQ ID NO: 1174 - protein, 118 aa, Artificial Sequence
  source: /note="Description of Artificial Sequence: Synthetic polypeptide"
QVQLVQSGAEVKKPGASVKVSCKASGYTFTDYNIHWVRQAPGQGLEWVGYINPYNGRTGYNQKFKARATLTVDKSTSTAYMELRSLRSDDMAVYYCARWDGSSYFDYWGQGTTVTVSS

SEQ ID NO: 1175 - protein, 118 aa, Artificial Sequence
  source: /note="Description of Artificial Sequence: Synthetic polypeptide"
QVQLVQSGAEVKKPGASVKVSCKASGYTFTDYNIHWVRQATGQGLEWVGYINPYNGRTGYNQKFKARATLTVNKSISTAYMELSSLRSEDTAVYYCARWDGSSYFDYWGQGTTVTVSS

SEQ ID NO: 1176 - protein, 118 aa, Artificial Sequence
  source: /note="Description of Artificial Sequence: Synthetic polypeptide"
EVQLVESGGGLVQPGRSLRLSCTASGYTFTDYNIHWVRQAPGKGLEWVGYINPYNGRTGYNQKFKARATLSVDKSKSIAYLQMNSLKTEDTAVYYCARWDGSSYFDYWGQGTTVTVSS

SEQ ID NO: 1177 - protein, 118 aa, Artificial Sequence
  source: /note="Description of Artificial Sequence: Synthetic polypeptide"
QVQLVQSGSELKKPGASVKVSCKASGYTFTDYNIHWVRQAPGQGLEWVGYINPYNGRTGYNQKFKARAVLSVDKSVSTAYLQISSLKAEDTAVYYCARWDGSSYFDYWGQGTTVTVSS

SEQ ID NO: 1178 - protein, 106 aa, Artificial Sequence
  source: /note="Description of Artificial Sequence: Synthetic polypeptide"
EIVLTQSPATLSLSPGERATLSCSASSSVSYMHWYQQKPGQAPKLLIYEISKLASGIPARFSGSGSGTDYTLTISSLEPEDFAVYYCQQWNYPLLTFGQGTKLEIK

SEQ ID NO: 1179 - protein, 106 aa, Artificial Sequence
  source: /note="Description of Artificial Sequence: Synthetic polypeptide"
EIVLTQSPATLSLSPGERATLSCSASSSVSYMHWYQQKPGQAPKLLIYEISKLASGIPARFSGSGSGTDYTLTISRLEPEDFAVYYCQQWNYPLLTFGQGTKLEIK

SEQ ID NO: 1180 - protein, 106 aa, Artificial Sequence
  source: /note="Description of Artificial Sequence: Synthetic polypeptide"
EIVLTQSPDFQSVTPKEKVTITCSASSSVSYMHWYQQKPDQSPKLLIYEISKLASGVPSRFSGSGSGTDYTLTINSLEAEDAATYYCQQWNYPLLTFGQGTKLEIK

SEQ ID NO: 1181 - protein, 106 aa, Artificial Sequence
  source: /note="Description of Artificial Sequence: Synthetic polypeptide"
DIQLTQSPSFLSASVGDRVTITCSASSSVSYMHWYQQKPGKAPKLLIYEISKLASGVPSRFSGSGSGTEYTLTISSLQPEDFATYYCQQWNYPLLTFGQGTKLEIK

SEQ ID NO: 1182 - protein, 106 aa, Artificial Sequence
  source: /note="Description of Artificial Sequence: Synthetic polypeptide"
AIQLTQSPSSLSASVGDRVTITCSASSSVSYMHWYQQKPGKAPKLLIYEISKLASGVPSRFSGSGSGTDYTLTISSLQPEDFATYYCQQWNYPLLTFGQGTKLEIK

SEQ ID NO: 1183 - protein, 106 aa, Artificial Sequence
  source: /note="Description of Artificial Sequence: Synthetic polypeptide"
AIRLTQSPFSLSASVGDRVTITCSASSSVSYMHWYQQKPAKAPKLFIYEISKLASGVPSRFSGSGSGTDYTLTISSLQPEDFATYYCQQWNYPLLTFGQGTKLEIK

SEQ ID NO: 1184 - protein, 106 aa, Artificial Sequence
  source: /note="Description of Artificial Sequence: Synthetic polypeptide"
DIVLTQSPDSLAVSLGERATINCSASSSVSYMHWYQQKPGQPPKLLIYEISKLASGVPDRFSGSGSGTDYTLTISSLQAEDVAVYYCQQWNYPLLTFGQGTKLEIK

SEQ ID NO: 1185 - protein, 5 aa, Artificial Sequence
  source: /note="Description of Artificial Sequence: Synthetic peptide"
GSWMN

SEQ ID NO: 1186 - protein, 17 aa, Artificial Sequence
  source: /note="Description of Artificial Sequence: Synthetic peptide"
RIYPGDGDTDYSGKFKG

SEQ ID NO: 1187 - protein, 12 aa, Artificial Sequence
  source: /note="Description of Artificial Sequence: Synthetic peptide"
SGYFNYVPVFDY

SEQ ID NO: 1188 - protein, 7 aa, Artificial Sequence
  source: /note="Description of Artificial Sequence: Synthetic peptide"
GYTFSGS

SEQ ID NO: 1189 - protein, 6 aa, Artificial Sequence
  source: /note="Description of Artificial Sequence: Synthetic peptide"
YPGDGD

SEQ ID NO: 1190 - protein, 10 aa, Artificial Sequence
  source: /note="Description of Artificial Sequence: Synthetic peptide"
GYTFSGSWMN

SEQ ID NO: 1191 - protein, 10 aa, Artificial Sequence
  source: /note="Description of Artificial Sequence: Synthetic peptide"
SANSTVGYIH

SEQ ID NO: 1192 - protein, 7 aa, Artificial Sequence
  source: /note="Description of Artificial Sequence: Synthetic peptide"
TTSNLAS

SEQ ID NO: 1193 - protein, 8 aa, Artificial Sequence
  source: /note="Description of Artificial Sequence: Synthetic peptide"
HQWSFYPT

SEQ ID NO: 1194 - protein, 6 aa, Artificial Sequence
  source: /note="Description of Artificial Sequence: Synthetic peptide"
NSTVGY

SEQ ID NO: 1195 - protein, 105 aa, Artificial Sequence
  source: /note="Description of Artificial Sequence: Synthetic polypeptide"
QIVLTQSPAIMSASLGEEIALTCSANSTVGYIHWYQQKSGTSPKLLIYTTSNLASGVPSRFSGSGSGTFYSLTISSVEAEDAADYFCHQWSFYPTFGGGTKLEIK

SEQ ID NO: 1196 - protein, 121 aa, Artificial Sequence
  source: /note="Description of Artificial Sequence: Synthetic polypeptide"
QIQLQQSGPEVVKPGASVQISCKASGYTFSGSWMNWVKQRPGKGLEWIGRIYPGDGDTDYSGKFKGRATLTADKSSSTAYMRLSSLTSEDSAVYFCARSGYFNYVPVFDYWGQGTTLSVSS

SEQ ID NO: 1197 - protein, 121 aa, Artificial Sequence
  source: /note="Description of Artificial Sequence: Synthetic polypeptide"
QIQLVQSGAEVKKPGASVKVSCKASGYTFSGSWMNWVRQAPGQGLEWIGRIYPGDGDTDYSGKFKGRATLTADKSTSTAYMELSSLRSEDTAVYYCARSGYFNYVPVFDYWGQGTTVTVSS

SEQ ID NO: 1198 - protein, 121 aa, Artificial Sequence
  source: /note="Description of Artificial Sequence: Synthetic polypeptide"
QIQLVQSGAEVKKPGSSVKVSCKASGYTFSGSWMNWVRQAPGQGLEWIGRIYPGDGDTDYSGKFKGRATLTADKSTSTAYMELSSLRSEDTAVYYCARSGYFNYVPVFDYWGQGTTVTVSS

SEQ ID NO: 1199 - protein, 121 aa, Artificial Sequence
  source: /note="Description of Artificial Sequence: Synthetic polypeptide"
EIQLVQSGAEVKKPGESLKISCKASGYTFSGSWMNWVRQMPGKGLEWIGRIYPGDGDTDYSGKFKGQATLSADKSISTAYLQWSSLKASDTAMYYCARSGYFNYVPVFDYWGQGTTVTVSS

SEQ ID NO: 1200 - protein, 121 aa, Artificial Sequence
  source: /note="Description of Artificial Sequence: Synthetic polypeptide"
QIQLVQSGSELKKPGASVKVSCKASGYTFSGSWMNWVRQAPGQGLEWIGRIYPGDGDTDYSGKFKGRAVLSADKSVSTAYLQISSLKAEDTAVYYCARSGYFNYVPVFDYWGQGTTVTVSS

SEQ ID NO: 1201 - protein, 121 aa, Artificial Sequence
  source: /note="Description of Artificial Sequence: Synthetic polypeptide"
QIQLVQSGSELKKPGASVKVSCKASGYTFSGSWMNWVRQAPGQGLEWIGRIYPGDGDTDYSGKFKGRAVLSADKSVSMAYLQISSLKAEDTAVYYCARSGYFNYVPVFDYWGQGTTVTVSS

SEQ ID NO: 1202 - protein, 121 aa, Artificial Sequence
  source: /note="Description of Artificial Sequence: Synthetic polypeptide"
EIQLVESGGGLVQPGRSLRLSCTASGYTFSGSWMNWVRQAPGKGLEWIGRIYPGDGDTDYSGKFKGRATLSADKSKSIAYLQMNSLKTEDTAVYYCARSGYFNYVPVFDYWGQGTTVTVSS

SEQ ID NO: 1203 - protein, 105 aa, Artificial Sequence
  source: /note="Description of Artificial Sequence: Synthetic polypeptide"
EIVLTQSPATLSLSPGERATLSCSANSTVGYIHWYQQKPGQAPKLLIYTTSNLASGIPARFSGSGSGTDYTLTISSLEPEDFAVYFCHQWSFYPTFGQGTKLEIK

SEQ ID NO: 1204 - protein, 105 aa, Artificial Sequence
  source: /note="Description of Artificial Sequence: Synthetic polypeptide"
DIQLTQSPSFLSASVGDRVTITCSANSTVGYIHWYQQKPGKAPKLLIYTTSNLASGVPSRFSGSGSGTEYTLTISSLQPEDFATYFCHQWSFYPTFGQGTKLEIK

SEQ ID NO: 1205 - protein, 105 aa, Artificial Sequence
  source: /note="Description of Artificial Sequence: Synthetic polypeptide"
EIVLTQSPATLSLSPGERATLSCSANSTVGYIHWYQQKPGQAPKLLIYTTSNLASGIPARFSGSGPGTDYTLTISSLEPEDFAVYFCHQWSFYPTFGQGTKLEIK

SEQ ID NO: 1206 - protein, 105 aa, Artificial Sequence
  source: /note="Description of Artificial Sequence: Synthetic polypeptide"
DIVLTQSPDSLAVSLGERATINCSANSTVGYIHWYQQKPGQPPKLLIYTTSNLASGVPDRFSGSGSGTDYTLTISSLQAEDVAVYFCHQWSFYPTFGQGTKLEIK

SEQ ID NO: 1207 - protein, 105 aa, Artificial Sequence
  source: /note="Description of Artificial Sequence: Synthetic polypeptide"
EIVLTQSPDFQSVTPKEKVTITCSANSTVGYIHWYQQKPDQSPKLLIYTTSNLASGVPSRFSGSGSGTDYTLTINSLEAEDAATYFCHQWSFYPTFGQGTKLEIK

SEQ ID NO: 1208 - protein, 5 aa, Artificial Sequence
  source: /note="Description of Artificial Sequence: Synthetic peptide"
DYYMY

SEQ ID NO: 1209 - protein, 17 aa, Artificial Sequence
  source: /note="Description of Artificial Sequence: Synthetic peptide"
TISGGGSYTYSPDSVKG

SEQ ID NO: 1210 - protein, 14 aa, Artificial Sequence
  source: /note="Description of Artificial Sequence: Synthetic peptide"
ERDIYYGNFNAMVY

SEQ ID NO: 1211 - protein, 7 aa, Artificial Sequence
  source: /note="Description of Artificial Sequence: Synthetic peptide"
GFTFSDY

SEQ ID NO: 1212 - protein, 6 aa, Artificial Sequence
  source: /note="Description of Artificial Sequence: Synthetic peptide"
SGGGSY

SEQ ID NO: 1213 - protein, 10 aa, Artificial Sequence
  source: /note="Description of Artificial Sequence: Synthetic peptide"
GFTFSDYYMY

SEQ ID NO: 1214 - protein, 15 aa, Artificial Sequence
  source: /note="Description of Artificial Sequence: Synthetic peptide"
RASKSVSTSGYSYMH

SEQ ID NO: 1215 - protein, 7 aa, Artificial Sequence
  source: /note="Description of Artificial Sequence: Synthetic peptide"
LASNLES

SEQ ID NO: 1216 - protein, 9 aa, Artificial Sequence
  source: /note="Description of Artificial Sequence: Synthetic peptide"
QHSRDLPWT

SEQ ID NO: 1217 - protein, 11 aa, Artificial Sequence
  source: /note="Description of Artificial Sequence: Synthetic peptide"
SKSVSTSGYSY

SEQ ID NO: 1218 - protein, 111 aa, Artificial Sequence
  source: /note="Description of Artificial Sequence: Synthetic polypeptide"
DIVLTQSPVSLTVSLGQRATISCRASKSVSTSGYSYMHWYQQKPGQPPKLLIYLASNLESGVPARFSGSGSGTDFTLNIHPVEEEDAATYYCQHSRDLPWTFGGGTKLEIK

SEQ ID NO: 1219 - protein, 123 aa, Artificial Sequence
  source: /note="Description of Artificial Sequence: Synthetic polypeptide"
EVQLVESGGGLVKPGGSLKLSCAASGFTFSDYYMYWVRQTPEKRLEWVATISGGGSYTYSPDSVKGRFTISRDNAKNNLYLQMSSLRSEDTAMYFCARERDIYYGNFNAMVYWGRGTSVTVSS

SEQ ID NO: 1220 - protein, 123 aa, Artificial Sequence
  source: /note="Description of Artificial Sequence: Synthetic polypeptide"
EVQLLESGGGLVQPGGSLRLSCAASGFTFSDYYMYWVRQAPGKGLEWVATISGGGSYTYSPDSVKGRFTISRDNSKNTLYLQMNSLRAEDTAVYYCARERDIYYGNFNAMVYWGRGTLVTVSS

SEQ ID NO: 1221 - protein, 123 aa, Artificial Sequence
  source: /note="Description of Artificial Sequence: Synthetic polypeptide"
EVQLVESGGGLVQPGGSLRLSCAASGFTFSDYYMYWVRQAPGKGLEWVATISGGGSYTYSPDSVKGRFTISRDNAKNSLYLQMNSLRAEDTAVYYCARERDIYYGNFNAMVYWGRGTLVTVSS

SEQ ID NO: 1222 - protein, 123 aa, Artificial Sequence
  source: /note="Description of Artificial Sequence: Synthetic polypeptide"
QVQLVESGGGVVQPGRSLRLSCAASGFTFSDYYMYWVRQAPGKGLEWVATISGGGSYTYSPDSVKGRFTISRDNSKNTLYLQMNSLRAEDTAVYYCARERDIYYGNFNAMVYWGRGTLVTVSS

SEQ ID NO: 1223 - protein, 123 aa, Artificial Sequence
  source: /note="Description of Artificial Sequence: Synthetic polypeptide"
QVQLVESGGGLVKPGGSLRLSCAASGFTFSDYYMYWIRQAPGKGLEWVATISGGGSYTYSPDSVKGRFTISRDNAKNSLYLQMNSLRAEDTAVYYCARERDIYYGNFNAMVYWGRGTLVTVSS

SEQ ID NO: 1224 - protein, 111 aa, Artificial Sequence
  source: /note="Description of Artificial Sequence: Synthetic polypeptide"
EIVLTQSPGTLSLSPGERATLSCRASKSVSTSGYSYMHWYQQKPGQAPRLLIYLASNLESGIPDRFSGSGSGTDFTLTISRLEPEDFAVYYCQHSRDLPWTFGGGTKVEIK

SEQ ID NO: 1225 - protein, 111 aa, Artificial Sequence
  source: /note="Description of Artificial Sequence: Synthetic polypeptide"
EIVLTQSPATLSLSPGERATLSCRASKSVSTSGYSYMHWYQQKPGQAPRLLIYLASNLESGIPARFSGSGSGTDFTLTISSLEPEDFAVYYCQHSRDLPWTFGGGTKVEIK

SEQ ID NO: 1226 - protein, 111 aa, Artificial Sequence
  source: /note="Description of Artificial Sequence: Synthetic polypeptide"
DIQLTQSPSTLSASVGDRVTITCRASKSVSTSGYSYMHWYQQKPGKAPKLLIYLASNLESGVPSRFSGSGSGTEFTLTISSLQPDDFATYYCQHSRDLPWTFGGGTKVEIK

SEQ ID NO: 1227 - protein, 111 aa, Artificial Sequence
  source: /note="Description of Artificial Sequence: Synthetic polypeptide"
AIQLTQSPSSLSASVGDRVTITCRASKSVSTSGYSYMHWYQQKPGKAPKLLIYLASNLESGVPSRFSGSGSGTDFTLTISSLQPEDFATYYCQHSRDLPWTFGGGTKVEIK

SEQ ID NO: 1228 - skipped

SEQ ID NO: 1229 - protein, 5 aa, Artificial Sequence
  source: /note="Description of Artificial Sequence: Synthetic peptide"
GYFWN

SEQ ID NO: 1230 - protein, 16 aa, Artificial Sequence
  source: /note="Description of Artificial Sequence: Synthetic peptide"
YISYDGSNNYNPSLKN

SEQ ID NO: 1231 - protein, 11 aa, Artificial Sequence
  source: /note="Description of Artificial Sequence: Synthetic peptide"
PSPGTGYAVDY

SEQ ID NO: 1232 - protein, 8 aa, Artificial Sequence
  source: /note="Description of Artificial Sequence: Synthetic peptide"
GYSITSGY

SEQ ID NO: 1233 - protein, 6 aa, Artificial Sequence
  source: /note="Description of Artificial Sequence: Synthetic peptide"
SYDGSN

SEQ ID NO: 1234 - protein, 11 aa, Artificial Sequence
  source: /note="Description of Artificial Sequence: Synthetic peptide"
GYSITSGYFWN

SEQ ID NO: 1235 - protein, 16 aa, Artificial Sequence
  source: /note="Description of Artificial Sequence: Synthetic peptide"
RSSQSLVHSNGNTYLH

SEQ ID NO: 1236 - protein, 7 aa, Artificial Sequence
  source: /note="Description of Artificial Sequence: Synthetic peptide"
KVSNRFS

SEQ ID NO: 1237 - protein, 9 aa, Artificial Sequence
  source: /note="Description of Artificial Sequence: Synthetic peptide"
SQSTHVPFT

SEQ ID NO: 1238 - protein, 12 aa, Artificial Sequence
  source: /note="Description of Artificial Sequence: Synthetic peptide"
SQSLVHSNGNTY

SEQ ID NO: 1239 - protein, 112 aa, Artificial Sequence
  source: /note="Description of Artificial Sequence: Synthetic polypeptide"
NVVMTQTPLSLPVSLGDQASISCRSSQSLVHSNGNTYLHWYLQKPGQSPKFLIYKVSNRFSGVPDRFSGGGSGTEFTLKISRVEAEDLGVYFCSQSTHVPFTFGSGTKLEIK

SEQ ID NO: 1240 - protein, 120 aa, Artificial Sequence
  source: /note="Description of Artificial Sequence: Synthetic polypeptide"
NVQLQESGPGLVKPSQSLSLTCSVAGYSITSGYFWNWIRQFPGNKLEWMGYISYDGSNNYNPSLKNRISITRDTSKNQFFLKLNSVTTEDTATYYCASPSPGTGYAVDYWGQGTSVTVSS

SEQ ID NO: 1241 - protein, 120 aa, Artificial Sequence
  source: /note="Description of Artificial Sequence: Synthetic polypeptide"
QVQLQESGPGLVKPSETLSLTCTVSGYSITSGYFWNWIRQPPGKGLEWIGYISYDGSNNYNPSLKNRVTISRDTSKNQFSLKLSSVTAADTAVYYCASPSPGTGYAVDYWGQGTLVTVSS

SEQ ID NO: 1242 - protein, 120 aa, Artificial Sequence; identical to SEQ ID NO: 1241
  source: /note="Description of Artificial Sequence: Synthetic polypeptide"

SEQ ID NO: 1243 - protein, 120 aa, Artificial Sequence
  source: /note="Description of Artificial Sequence: Synthetic polypeptide"
QVQLVESGGGLVQPGGSLRLSCSVSGYSITSGYFWNWVRQAPGKGLEWVGYISYDGSNNYNPSLKNRFTISRDTSKNTFYLQMNSLRAEDTAVYYCASPSPGTGYAVDYWGQGTLVTVSS

SEQ ID NO: 1244 - protein, 111 aa, Artificial Sequence
  source: /note="Description of Artificial Sequence: Synthetic polypeptide"
VVMTQSPGTLSLSPGERATLSCRSSQSLVHSNGNTYLHWYQQKPGQAPRFLIYKVSNRFSGIPDRFSGSGSGTDFTLTISRLEPEDFAVYFCSQSTHVPFTFGQGTKLEIK

SEQ ID NO: 1245 - protein, 112 aa, Artificial Sequence
  source: /note="Description of Artificial Sequence: Synthetic polypeptide"
EVVMTQSPATLSLSPGERATLSCRSSQSLVHSNGNTYLHWYQQKPGQAPRFLIYKVSNRFSGIPARFSGSGSGTDFTLTISSLEPEDFAVYFCSQSTHVPFTFGQGTKLEIK

SEQ ID NO: 1246 - protein, 112 aa, Artificial Sequence
  source: /note="Description of Artificial Sequence: Synthetic polypeptide"
EVVMTQSPATLSVSPGERATLSCRSSQSLVHSNGNTYLHWYQQKPGQAPRFLIYKVSNRFSGIPARFSGSGSGTEFTLTISSLQSEDFAVYFCSQSTHVPFTFGQGTKLEIK

SEQ ID NO: 1247 - protein, 112 aa, Artificial Sequence
  source: /note="Description of Artificial Sequence: Synthetic polypeptide"
DVQMTQSPSSLSASVGDRVTITCRSSQSLVHSNGNTYLHWYQQKPGKAPKFLIYKVSNRFSGVPSRFSGSGSGTDFTFTISSLQPEDIATYFCSQSTHVPFTFGQGTKLEIK

SEQ ID NO: 1248 - protein, 5 aa, Artificial Sequence
  source: /note="Description of Artificial Sequence: Synthetic peptide"
DYIVH

SEQ ID NO: 1249 - protein, 17 aa, Artificial Sequence
  source: /note="Description of Artificial Sequence: Synthetic peptide"
WINTYTGTPTYADDFEG

SEQ ID NO: 1250 - protein, 13 aa, Artificial Sequence
  source: /note="Description of Artificial Sequence: Synthetic peptide"
SWRRGIRGIGFDY

SEQ ID NO: 1251 - protein, 7 aa, Artificial Sequence
  source: /note="Description of Artificial Sequence: Synthetic peptide"
GYTFTDY

SEQ ID NO: 1252 - protein, 6 aa, Artificial Sequence
  source: /note="Description of Artificial Sequence: Synthetic peptide"
NTYTGT

SEQ ID NO: 1253 - protein, 10 aa, Artificial Sequence
  source: /note="Description of Artificial Sequence: Synthetic peptide"
GYTFTDYIVH

SEQ ID NO: 1254 - protein, 11 aa, Artificial Sequence
  source: /note="Description of Artificial Sequence: Synthetic peptide"
KASKSINKYLA

SEQ ID NO: 1255 - protein, 7 aa, Artificial Sequence
  source: /note="Description of Artificial Sequence: Synthetic peptide"
DGSTLQS

SEQ ID NO: 1256 - protein, 9 aa, Artificial Sequence
  source: /note="Description of Artificial Sequence: Synthetic peptide"
QQHNEYPPT

SEQ ID NO: 1257 - protein, 7 aa, Artificial Sequence
  source: /note="Description of Artificial Sequence: Synthetic peptide"
SKSINKY

SEQ ID NO: 1258 - protein, 107 aa, Artificial Sequence
  source: /note="Description of Artificial Sequence: Synthetic polypeptide"
DVQMTQSPYNLAASPGESVSINCKASKSINKYLAWYQQKPGKPNKLLIYDGSTLQSGIPSRFSGSGSGTDFTLTIRGLEPEDFGLYYCQQHNEYPPTFGAGTKLELK

SEQ ID NO: 1259 - protein, 122 aa, Artificial Sequence
  source: /note="Description of Artificial Sequence: Synthetic polypeptide"
QLQLVQSGPELREPGESVKISCKASGYTFTDYIVHWVKQAPGKGLKWMGWINTYTGTPTYADDFEGRFVFSLEASASTANLQISNLKNEDTATYFCARSWRRGIRGIGFDYWGQGVMVTVSS

SEQ ID NO: 1260 - protein, 122 aa, Artificial Sequence
  source: /note="Description of Artificial Sequence: Synthetic polypeptide"
QLQLVQSGAEVKKPGASVKVSCKASGYTFTDYIVHWVRQAPGQGLEWMGWINTYTGTPTYADDFEGWVTMTLDASISTAYMELSRLRSDDTAVYYCARSWRRGIRGIGFDYWGQGTMVTVSS

SEQ ID NO: 1261 - protein, 122 aa, Artificial Sequence
  source: /note="Description of Artificial Sequence: Synthetic polypeptide"
QLQLVQSGAEVKKPGASVKVSCKASGYTFTDYIVHWVRQAPGQGLEWMGWINTYTGTPTYADDFEGRVTMTLDASTSTAYMELSSLRSEDTAVYYCARSWRRGIRGIGFDYWGQGTMVTVSS

SEQ ID NO: 1262 - protein, 122 aa, Artificial Sequence
  source: /note="Description of Artificial Sequence: Synthetic polypeptide"
QLQLVQSGAEVKKPGASVKVSCKASGYTFTDYIVHWVRQAPGQRLEWMGWINTYTGTPTYADDFEGRVTITLDASASTAYMELSSLRSEDMAVYYCARSWRRGIRGIGFDYWGQGTMVTVSS

SEQ ID NO: 1263 - protein, 122 aa, Artificial Sequence
  source: /note="Description of Artificial Sequence: Synthetic polypeptide"
QLQLVQSGAEVKKPGASVKVSCKASGYTFTDYIVHWVRQATGQGLEWMGWINTYTGTPTYADDFEGRVTMTLNASISTAYMELSSLRSEDTAVYYCARSWRRGIRGIGFDYWGQGTMVTVSS

SEQ ID NO: 1264 - protein, 107 aa, Artificial Sequence
  source: /note="Description of Artificial Sequence: Synthetic polypeptide"
EVVMTQSPGTLSLSPGERATLSCKASKSINKYLAWYQQKPGQAPRLLIYDGSTLQSGIPDRFSGSGSGTDFTLTISRLEPEDFAVYYCQQHNEYPPTFGQGTKLEIK

SEQ ID NO: 1265 - protein, 107 aa, Artificial Sequence
  source: /note="Description of Artificial Sequence: Synthetic polypeptide"
EVVMTQSPATLSLSPGERATLSCKASKSINKYLAWYQQKPGQAPRLLIYDGSTLQSGIPARFSGSGSGTDFTLTISSLEPEDFAVYYCQQHNEYPPTFGQGTKLEIK

SEQ ID NO: 1266 - protein, 107 aa, Artificial Sequence
  source: /note="Description of Artificial Sequence: Synthetic polypeptide"
DVQMTQSPSSLSASVGDRVTITCKASKSINKYLAWYQQKPGKAPKLLIYDGSTLQSGVPSRFSGSGSGTDFTLTISSLQPEDFATYYCQQHNEYPPTFGQGTKLEIK

SEQ ID NO: 1267 - protein, 107 aa, Artificial Sequence
  source: /note="Description of Artificial Sequence: Synthetic polypeptide"
AVRMTQSPSSFSASTGDRVTITCKASKSINKYLAWYQQKPGKAPKLLIYDGSTLQSGVPSRFSGSGSGTDFTLTISCLQSEDFATYYCQQHNEYPPTFGQGTKLEIK

SEQ ID NO: 1268 - protein, 5 aa, Artificial Sequence
  source: /note="Description of Artificial Sequence: Synthetic peptide"
NYGVH

SEQ ID NO: 1269 - protein, 16 aa, Artificial Sequence
  source: /note="Description of Artificial Sequence: Synthetic peptide"
VIWSDGSTDYDTAFIS

SEQ ID NO: 1270 - protein, 9 aa, Artificial Sequence
  source: /note="Description of Artificial Sequence: Synthetic peptide"
RAVVADFDY

SEQ ID NO: 1271 - protein, 6 aa, Artificial Sequence
  source: /note="Description of Artificial Sequence: Synthetic peptide"
GFSLTN

SEQ ID NO: 1272 - protein, 9 aa, Artificial Sequence
  source: /note="Description of Artificial Sequence: Synthetic peptide"
VIWSDGSTD

SEQ ID NO: 1273 - protein, 10 aa, Artificial Sequence
  source: /note="Description of Artificial Sequence: Synthetic peptide"
GFSLTNYGVH

SEQ ID NO: 1274 - protein, 117 aa, Artificial Sequence
  source: /note="Description of Artificial Sequence: Synthetic polypeptide"
QVQLKQSGPGLLQPSQSLSITCTVSGFSLTNYGVHWVRQSPGKGLEWLGVIWSDGSTDYDTAFISRLSISKDNSKSQVFFKLNSLQADDTAIYYCARRAVVADFDYWGQGTTLTVSS

SEQ ID NO: 1275 - protein, 16 aa, Artificial Sequence
  source: /note="Description of Artificial Sequence: Synthetic peptide"
KASKEVTIFGSISALH

SEQ ID NO: 1276 - protein, 7 aa, Artificial Sequence
  source: /note="Description of Artificial Sequence: Synthetic peptide"
NGAKLES

SEQ ID NO: 1277 - protein, 9 aa, Artificial Sequence
  source: /note="Description of Artificial Sequence: Synthetic peptide"
LQNKEVPFT

SEQ ID NO: 1278 - protein, 119 aa, Artificial Sequence
  source: /note="Description of Artificial Sequence: Synthetic polypeptide"
DIVLTQSPASLAVSLGQKATISCKASKEVTIFGSISALHWYQQKPGQPPKLIYNGAKLESGVSARFSDSGSQNRSPFGNQLSFTLTIAPVEADDAATYYCLQNKEVPFTFGSGTKLEIK

SEQ ID NO: 1279 - protein, 117 aa, Artificial Sequence
  source: /note="Description of Artificial Sequence: Synthetic polypeptide"
DIVLTQSPDSLAVSLGERATINCKASKEVTIFGSISALHWYQQKPGQPPKLLYNGAKLESGVSARFGVPDRFSRSGSGLDFTLTISSLQAEDVAVYYCLQNKEVPFTFGQGTKLEIK

SEQ ID NO: 1280 - protein, 117 aa, Artificial Sequence
  source: /note="Description of Artificial Sequence: Synthetic polypeptide"
EIVLTQSPDFQSVTPKEKVTITCKASKEVTIFGSISALHWYQQKPDQSPKLLYNGAKLESGVSARFGVPSRFSRSGSGLDFTLTINSLEAEDAATYYCLQNKEVPFTFGQGTKLEIK

SEQ ID NO: 1281 - protein, 117 aa, Artificial Sequence
  source: /note="Description of Artificial Sequence: Synthetic polypeptide"
AIQLTQSPSSLSASVGDRVTITCKASKEVTIFGSISALHWYQQKPGKAPKLLYNGAKLESGVSARFGVPSRFSRSGSGLDFTLTISSLQPEDFATYYCLQNKEVPFTFGQGTKLEIK

SEQ ID NO: 1282 - protein, 117 aa, Artificial Sequence
  source: /note="Description of Artificial Sequence: Synthetic polypeptide"
DIVLTQTPLSLSVTPGQPASISCKASKEVTIFGSISALHWYLQKPGQPPKLLYNGAKLESGVSARFGVPDRFSRSGSGLDFTLKISRVEAEDVGVYYCLQNKEVPFTFGQGTKLEIK

SEQ ID NO: 1283 - protein, 117 aa, Artificial Sequence
  source: /note="Description of Artificial Sequence: Synthetic polypeptide"
QVTLKESGPVLVKPTETLTLTCTVSGFSLTNYGVHWVRQPPGKALEWLGVIWSDGSTDYDTAFISRLTISKDNSKSQVVLTMTNMDPVDTATYYCARRAVVADFDYWGQGTTVTVSS

SEQ ID NO: 1284 - protein, 117 aa, Artificial Sequence
  source: /note="Description of Artificial Sequence: Synthetic polypeptide"
QVQLQESGPGLVKPSGTLSLTCAVSGFSLTNYGVHWVRQPPGKGLEWLGVIWSDGSTDYDTAFISRLTISKDNSKSQVSLKLSSVTAADTAVYYCARRAVVADFDYWGQGTTVTVSS

SEQ ID NO: 1285 - protein, 117 aa, Artificial Sequence
  source: /note="Description of Artificial Sequence: Synthetic polypeptide"
QVQLQQSGPGLVKPSQTLSLTCAVSGFSLTNYGVHWVRQSPSRGLEWLGVIWSDGSTDYDTAFISRLTINKDNSKSQVSLQLNSVTPEDTAVYYCARRAVVADFDYWGQGTTVTVSS

SEQ ID NO: 1286 - protein, 117 aa, Artificial Sequence
  source: /note="Description of Artificial Sequence: Synthetic polypeptide"
EVQLVESGGGLVQPGPSLRLSCTVSGFSLTNYGVHWVRQAPGKGLEWLGVIWSDGSTDYDTAFISRLTISKDNSKSIVYLQMNSLKTEDTAVYYCARRAVVADFDYWGQGTTVTVSS

SEQ ID NO: 1287 - protein, 117 aa, Artificial Sequence
  source: /note="Description of Artificial Sequence: Synthetic polypeptide"
EVQLVQSGAEVKKPGESLRISCKVSGFSLTNYGVHWVRQMPGKGLEWLGVIWSDGSTDYDTAFISQLTISKDNSISTVYLQWSSLKASDTAMYYCARRAVVADFDYWGQGTTVTVSS

SEQ ID NO: 1288 - protein, 5 aa, Artificial Sequence
  source: /note="Description of Artificial Sequence: Synthetic peptide"
SYGMS

SEQ ID NO: 1289 - protein, 17 aa, Artificial Sequence
  source: /note="Description of Artificial Sequence: Synthetic peptide"
LISSGGSYTYYTDSVKG

SEQ ID NO: 1290 - protein, 8 aa, Artificial Sequence
  source: /note="Description of Artificial Sequence: Synthetic peptide"
HGGNFFDY

SEQ ID NO: 1291 - protein, 7 aa, Artificial Sequence
  source: /note="Description of Artificial Sequence: Synthetic peptide"
GFTFRSY

SEQ ID NO: 1292 - protein, 6 aa, Artificial Sequence
  source: /note="Description of Artificial Sequence: Synthetic peptide"
SSGGSY

SEQ ID NO: 1293 - protein, 10 aa, Artificial Sequence
  source: /note="Description of Artificial Sequence: Synthetic peptide"
GFTFRSYGMS

SEQ ID NO: 1294 - protein, 10 aa, Artificial Sequence
  source: /note="Description of Artificial Sequence: Synthetic peptide"
SVSSSVSYMH

SEQ ID NO: 1295 - protein, 7 aa, Artificial Sequence
  source: /note="Description of Artificial Sequence: Synthetic peptide"
DTSKLAS

SEQ ID NO: 1296 - protein, 10 aa, Artificial Sequence
  source: /note="Description of Artificial Sequence: Synthetic peptide"
QQWSSNPQYT

SEQ ID NO: 1297 - protein, 6 aa, Artificial Sequence
  source: /note="Description of Artificial Sequence: Synthetic peptide"
SSSVSY

SEQ ID NO: 1298 - protein, 5 aa, Artificial Sequence
  source: /note="Description of Artificial Sequence: Synthetic peptide"
SSWMN

SEQ ID NO: 1299 - protein, 17 aa, Artificial Sequence
  source: /note="Description of Artificial Sequence: Synthetic peptide"
RIYPGDGDTKYNGKFKG

SEQ ID NO: 1300 - protein, 10 aa, Artificial Sequence
  source: /note="Description of Artificial Sequence: Synthetic peptide"
RGTGGWYFDV

SEQ ID NO: 1301 - protein, 10 aa, Artificial Sequence
  source: /note="Description of Artificial Sequence: Synthetic peptide"
RGTGGWYFDV

SEQ ID NO: 1302 - protein, 7 aa, Artificial Sequence
  source: /note="Description of Artificial Sequence: Synthetic peptide"
GYAFSSS

SEQ ID NO: 1303 - protein, 6 aa, Artificial Sequence
  source: /note="Description of Artificial Sequence: Synthetic peptide"
YPGDGD

SEQ ID NO: 1304 - protein, 10 aa, Artificial Sequence
  source: /note="Description of Artificial Sequence: Synthetic peptide"
GYAFSSSWMN

SEQ ID NO: 1305 - protein, 15 aa, Artificial Sequence
  source: /note="Description of Artificial Sequence: Synthetic peptide"
RASESVDSSGNSFMH

SEQ ID NO: 1306 - protein, 7 aa, Artificial Sequence
  source: /note="Description of Artificial Sequence: Synthetic peptide"
RASNLES

SEQ ID NO: 1307 - protein, 9 aa, Artificial Sequence
  source: /note="Description of Artificial Sequence: Synthetic peptide"
QQSFDDPFT

SEQ ID NO: 1308 - protein, 11 aa, Artificial Sequence
  source: /note="Description of Artificial Sequence: Synthetic peptide"
SESVDSSGNSF

SEQ ID NO: 1309 - protein, 246 aa, Artificial Sequence
  source: /note="Description of Artificial Sequence: Synthetic polypeptide"
QVQLVQSGAEVKKPGSSVKVSCKASGHDFDKFYIHWVRQAPGQGLEWMGRVSAGSGNVKYNEKFKGRVTITADTSTSTAYMELSSLRSEDTAVYYCAGSYYSYDVLDYWGQGTTVTVSSGGGGSGGGGSGGGGSGGGGSDIQMTQSPSFLSASVGDRVTITCKASQNVGNRVAWYQQKPGKAPKALIYSSSHRYKGVPSRFSGSGSGTEFTLTISSLQPEDFATYFCQQFKSYPLTFGQGTKLEIK

SEQ ID NO: 1310 - protein, 119 aa, Artificial Sequence; identical to SEQ ID NO: 94
  source: /note="Description of Artificial Sequence: Synthetic polypeptide"

SEQ ID NO: 1311 - protein, 119 aa, Artificial Sequence
  source: /note="Description of Artificial Sequence: Synthetic polypeptide"
QVQLVQSGAEVKKPGSSVKVSCKASGTDFKLTYIHWVRQAPGQGLEWMGRIFPGSGNVKYNEKFKGRVTITADTSTSTAYMELSSLRSEDTAVYYCAVSYYSYDVLDYWGQGTTVTVSS

SEQ ID NO: 1312 - protein, 119 aa, Artificial Sequence
  source: /note="Description of Artificial Sequence: Synthetic polypeptide"
QVQLVQSGAEVKKPGSSVKVSCKASGHDFRLTYIHWVRQAPGQGLEWMGRISAGSGNVKYNEKFKGRVTITADTSTSTAYMELSSLRSEDTAVYYCAVSYYSYDVLDYWGQGTTVTVSS

SEQ ID NO: 1313 - protein, 107 aa, Artificial Sequence; identical to SEQ ID NO: 90
  source: /note="Description of Artificial Sequence: Synthetic polypeptide"

SEQ ID NO: 1314 - protein, 107 aa, Artificial Sequence; identical to SEQ ID NO: 141
  source: /note="Description of Artificial Sequence: Synthetic polypeptide"

SEQ ID NO: 1315 - protein, 5 aa, Artificial Sequence
  source: /note="Description of Artificial Sequence: Synthetic peptide"
AYGVN

SEQ ID NO: 1316 - protein, 16 aa, Artificial Sequence
  source: /note="Description of Artificial Sequence: Synthetic peptide"
MIWGDGNTDYNSALKS

SEQ ID NO: 1317 - protein, 12 aa, Artificial Sequence
  source: /note="Description of Artificial Sequence: Synthetic peptide"
DRVTATLYAMDY

SEQ ID NO: 1318 - protein, 7 aa, Artificial Sequence
  source: /note="Description of Artificial Sequence: Synthetic peptide"
GFSLTAY

SEQ ID NO: 1319 - protein, 5 aa, Artificial Sequence
  source: /note="Description of Artificial Sequence: Synthetic peptide"
WGDGN

SEQ ID NO: 1320 - protein, 10 aa, Artificial Sequence
  source: /note="Description of Artificial Sequence: Synthetic peptide"
GFSLTAYGVN

SEQ ID NO: 1321 - protein, 11 aa, Artificial Sequence
  source: /note="Description of Artificial Sequence: Synthetic peptide"
SASQGISNYLN

SEQ ID NO: 1322 - protein, 7 aa, Artificial Sequence
  source: /note="Description of Artificial Sequence: Synthetic peptide"
YTSSLHS

SEQ ID NO: 1323 - protein, 9 aa, Artificial Sequence
  source: /note="Description of Artificial Sequence: Synthetic peptide"
QQYSKLPRT

SEQ ID NO: 1324 - protein, 107 aa, Artificial Sequence
  source: /note="Description of Artificial Sequence: Synthetic polypeptide"
DIQMTQSPSSLSASVGDRVTITCSASQGISNYLNWYQQTPGKAPKLLIYYTSSLHSGVPSRFSGSGSGTDYTFTISSLQPEDIATYYCQQYSKLPRTFGQGTKLQIT

SEQ ID NO: 1325 - protein, 120 aa, Artificial Sequence
  source: /note="Description of Artificial Sequence: Synthetic polypeptide"
QVQLQESGPGLVRPSQTLSLTCTVSGFSLTAYGVNWVRQPPGRGLEWLGMIWGDGNTDYNSALKSRVTMLKDTSKNQFSLRLSSVTAADTAVYYCARDRVTATLYAMDYWGQGSLVTVSS

SEQ ID NO: 1326 - protein, 246 aa, Artificial Sequence
  source: /note="Description of Artificial Sequence: Synthetic polypeptide"
QVQLVQSGAEVKKPGSSVKVSCKASGHDFRLTYIHWVRQAPGQGLEWMGRVSAGSGNTKYNEKFKGRVTITADTSTSTAYMELSSLRSEDTAVYYCAVSYYSYDVLDYWGQGTTVTVSSGGGGSGGGGSGGGGSGGGGSDIQMTQSPSFLSASVGDRVTITCKASQNVGDRVVWHQQKPGKAPKALIYSSSHRYKGVPSRFSGSGSGTEFTLTISSLQPEDFATYFCQQFKSYPLTFGQGTKLEIK

SEQ ID NO: 1327 - protein, 246 aa, Artificial Sequence
  source: /note="Description of Artificial Sequence: Synthetic polypeptide"
QVQLVQSGAEVKKPGSSVKVSCKASGHDFRLTYIHWVRQAPGQGLEWMGRVSAGSGNVKYNEKFKGRVTITADTSTSTAYMELSSLRSEDTAVYYCAVSYYSYDVLDYWGQGTTVTVSSGGGGSGGGGSGGGGSGGGGSDIQMTQSPSFLSASVGDRVTITCKASQNVGNRVVWHQQKPGKAPKALIYSSSHRYKGVPSRFSGSGSGTEFTLTISSLQPEDFATYFCQQFKSYPLTFGQGTKLEIK

SEQ ID NO: 1328 - protein, 246 aa, Artificial Sequence
  source: /note="Description of Artificial Sequence: Synthetic polypeptide"
QVQLVQSGAEVKKPGSSVKVSCKASGHDFRLTYIHWVRQAPGQGLEWMGRIYAGSGNVKYNEKFKGRVTITADTSTSTAYMELSSLRSEDTAVYYCAVSYYSYDVLDYWGQGTTVTVSSGGGGSGGGGSGGGGSGGGGSDIQMTQSPSFLSASVGDRVTITCKASQNVADRVVWHQQKPGKAPKALIYSSSHRYKGVPSRFSGSGSGTEFTLTISSLQPEDFATYFCQQFKSYPLTFGQGTKLEIK

SEQ ID NO: 1329 - protein, 246 aa, Artificial Sequence
  source: /note="Description of Artificial Sequence: Synthetic polypeptide"
QVQLVQSGAEVKKPGSSVKVSCKASGHDFKLTYIHWVRQAPGQGLEWMGRVSAGSGNTKYNEKFKGRVTITADTSTSTAYMELSSLRSEDTAVYYCAVSYYSYDVLDYWGQGTTVTVSSGGGGSGGGGSGGGGSGGGGSDIQMTQSPSFLSASVGDRVTITCKASQNVGDRVAWHQQKPGKAPKALIYSSSHRYKGVPSRFSGSGSGTEFTLTISSLQPEDFATYFCQQFKSYPLTFGQGTKLEIK

SEQ ID NO: 1330 - protein, 246 aa, Artificial Sequence
  source: /note="Description of Artificial Sequence: Synthetic polypeptide"
QVQLVQSGAEVKKPGSSVKVSCKASGHDFKLTYIHWVRQAPGQGLEWMGRVSAGSGNTKYNEKFKGRVTITADTSTSTAYMELSSLRSEDTAVYYCAVSYYSYDVLDYWGQGTTVTVSSGGGGSGGGGSGGGGSGGGGSDIQMTQSPSFLSASVGDRVTITCKASQNVDNRVAWHQQKPGKAPKALIYSSSHRYKGVPSRFSGSGSGTEFTLTISSLQPEDFATYFCQQFKSYPLTFGQGTKLEIK

SEQ ID NO: 1331 - protein, 246 aa, Artificial Sequence
  source: /note="Description of Artificial Sequence: Synthetic polypeptide"
QVQLVQSGAEVKKPGSSVKVSCKASGHDFRLTYIHWVRQAPGQGLEWMGRVSAGSGNVKYNEKFKGRVTITADTSTSTAYMELSSLRSEDTAVYYCAVSYYSYDVLDYWGQGTTVTVSSGGGGSGGGGSGGGGSGGGGSDIQMTQSPSFLSASVGDRVTITCKASQNVADRVVWHQQKPGKAPKALIYSSSHRYKGVPSRFSGSGSGTEFTLTISSLQPEDFATYFCQQFKSYPLTFGQGTKLEIK

SEQ ID NO: 1332 - protein, 246 aa, Artificial Sequence
  source: /note="Description of Artificial Sequence: Synthetic polypeptide"
QVQLVQSGAEVKKPGSSVKVSCKASGHDFRLTYIHWVRQAPGQGLEWMGRVYAGSGNTKYNEKFKGRVTITADTSTSTAYMELSSLRSEDTAVYYCAVSYYSYDVLDYWGQGTTVTVSSGGGGSGGGGSGGGGSGGGGSDIQMTQSPSFLSASVGDRVTITCKASQNVEDRVVWHQQKPGKAPKALIYSSSHRYKGVPSRFSGSGSGTEFTLTISSLQPEDFATYFCQQFKSYPLTFGQGTKLEIK

SEQ ID NO: 1333 - protein, 246 aa, Artificial Sequence
  source: /note="Description of Artificial Sequence: Synthetic polypeptide"
QVQLVQSGAEVKKPGSSVKVSCKASGHDFKLTYIHWVRQAPGQGLEWMGRVSAGSGNTKYNEKFKGRVTITADTSTSTAYMELSSLRSEDTAVYYCAVSYYSYDVLDYWGQGTTVTVSSGGGGSGGGGSGGGGSGGGGSDIQMTQSPSFLSASVGDRVTITCKASQNVADRVVWHQQKPGKAPKALIYSSSHRYKGVPSRFSGSGSGTEFTLTISSLQPEDFATYFCQQFKSYPLTFGQGTKLEIK

SEQ ID NO: 1334 - protein, 246 aa, Artificial Sequence
  source: /note="Description of Artificial Sequence: Synthetic polypeptide"
QVQLVQSGAEVKKPGSSVKVSCKASGHDFKLTYIHWVRQAPGQGLEWMGRISAGSGNTKYNEKFKGRVTITADTSTSTAYMELSSLRSEDTAVYYCAVSYYSYDVLDYWGQGTTVTVSSGGGGSGGGGSGGGGSGGGGSDIQMTQSPSFLSASVGDRVTITCKASQNVGDRVVWHQQKPGKAPKALIYSSSHRYKGVPSRFSGSGSGTEFTLTISSLQPEDFATYFCQQFKSYPLTFGQGTKLEIK

SEQ ID NO: 1335 - protein, 246 aa, Artificial Sequence
  source: /note="Description of Artificial Sequence: Synthetic polypeptide"
QVQLVQSGAEVKKPGSSVKVSCKASGHDFKLTYIHWVRQAPGQGLEWMGRIYAGSGNTKYNEKFKGRVTITADTSTSTAYMELSSLRSEDTAVYYCAVSYYSYDVLDYWGQGTTVTVSSGGGGSGGGGSGGGGSGGGGSDIQMTQSPSFLSASVGDRVTITCKASQNVGDRVVWHQQKPGKAPKALIYSSSHRYKGVPSRFSGSGSGTEFTLTISSLQPEDFATYFCQQFKSYPLTFGQGTKLEIK

SEQ ID NO: 1336 - protein, 246 aa, Artificial Sequence
  source: /note="Description of Artificial Sequence: Synthetic polypeptide"
QVQLVQSGAEVKKPGSSVKVSCKASGTDFKLTYIHWVRQAPGQGLEWMGRIFPGSGNVKYNEKFKGRVTITADTSTSTAYMELSSLRSEDTAVYYCAVSYYSYDVLDYWGQGTTVTVSSGGGGSGGGGSGGGGSGGGGSDIQMTQSPSFLSASVGDRVTITCKASQNVDNRVAWYQQKPGKAPKALIYSSSHRYKGVPSRFSGSGSGTEFTLTISSLQPEDFATYFCQQFKSYPLTFGQGTKLEIK

SEQ ID NO: 1337 - protein, 246 aa, Artificial Sequence
  source: /note="Description of Artificial Sequence: Synthetic polypeptide"
QVQLVQSGAEVKKPGSSVKVSCKASGHDFRLTYIHWVRQAPGQGLEWMGRISAGSGNVKYNEKFKGRVTITADTSTSTAYMELSSLRSEDTAVYYCAVSYYSYDVLDYWGQGTTVTVSSGGGGSGGGGSGGGGSGGGGSDIQMTQSPSFLSASVGDRVTITCKASQNVADRVAWYQQKPGKAPKALIYSSSHRYKGVPSRFSGSGSGTEFTLTISSLQPEDFATYFCQQFKSYPLTFGQGTKLEIK

SEQ ID NO: 1338 - protein, 243 aa, Artificial Sequence
  source: /note="Description of Artificial Sequence: Synthetic polypeptide"
EVQLVESGGGLVQPGGSLRLSCAASGFTFSNFGMHWVRQAPGKGLEWVSYISSGSSTIYYADTLKGRFTISRDNSKNTLYLQMNSLRAEDTAVYYCARRGEGAMDYWGQGTTVTVSSGGGGSGGGGSGGGGSGGGGSDNQLTQSPSSLSASVGDRVTITCRASSSVNYIYWYQQKPGKAPKLLIYYTSNLAPGVPSRFSGSGSGNDYTLTISSLQPEDFATYYCQQFTSSPFTFGQGTKLEIK

SEQ ID NO: 1339 - protein, 242 aa, Artificial Sequence
  source: /note="Description of Artificial Sequence: Synthetic polypeptide"
EVQLVESGGGLVQPGGSLRLSCAASGFTFSNFGMHWVRQAPGKGLEWVSYISSGSSTIYYADTLKGRFTISRDNSKNTLYLQMNSLRAEDTAVYYCARRGEGAMDYWGQGTTVTVSSGGGGSGGGGSGGGGSGGGGSSNELTQPPSVSVSPGQTARITCRASSSVNYIYWYQQKSGQAPVLVIYYTSNLAPGIPERFSGSGSGNMYTLTISGAQVEDEADYYCQQFTSSPFTFGTGTKVTVL

SEQ ID NO: 1340 - protein, 243 aa, Artificial Sequence
  source: /note="Description of Artificial Sequence: Synthetic polypeptide"
QVQLVESGGGVVQPGRSLRLSCAASGFTFSNFGMHWVRQAPGKGLEWVAYISSGSSTIYYADTLKGRFTISRDNSKNTLYLQMNSLRAEDTAVYYCARRGEGAMDYWGQGTTVTVSSGGGGSGGGGSGGGGSGGGGSDNQLTQSPSFLSASVGDRVTITCRASSSVNYIYWYQQKPGKAPKLLIYYTSNLAPGVPSRFSGSGSGNEYTLTISSLQPEDFATYYCQQFTSSPFTFGQGTKLEIK

SEQ ID NO: 1341 - protein, 243 aa, Artificial Sequence
  source: /note="Description of Artificial Sequence: Synthetic polypeptide"
QVQLVESGGGVVQPGRSLRLSCAASGFTFSNFGMHWVRQAPGKGLEWVAYISSGSSTIYYADTLKGRFTISRDNSKNTLYLQMNSLRAEDTAVYYCARRGEGAMDYWGQGTTVTVSSGGGGSGGGGSGGGGSGGGGSDNQLTQSPSSLSASVGDRVTITCRASSSVNYIYWYQQKPGKAPKLLIYYTSNLAPGVPSRFSGSGSGNDYTLTISSLQPEDFATYYCQQFTSSPFTFGQGTKLEIK

SEQ ID NO: 1342 - protein, 242 aa, Artificial Sequence
  source: /note="Description of Artificial Sequence: Synthetic polypeptide"
QVQLVESGGGVVQPGRSLRLSCAASGFTFSNFGMHWVRQAPGKGLEWVAYISSGSSTIYYADTLKGRFTISRDNSKNTLYLQMNSLRAEDTAVYYCARRGEGAMDYWGQGTTVTVSSGGGGSGGGGSGGGGSGGGGSSNELTQPPSVSVSPGQTARITCRASSSVNYIYWYQQKSGQAPVLVIYYTSNLAPGIPERFSGSGSGNMYTLTISGAQVEDEADYYCQQFTSSPFTFGTGTKVTVL

SEQ ID NO: 1343 - protein, 243 aa, Artificial Sequence
  source: /note="Description of Artificial Sequence: Synthetic polypeptide"
EVQLVESGGGLVQPGGSLRLSCAASGFTFSNFGMHWVRQAPGKGLEWVSYISSGSSTIYYADTLKGRFTISRDNSKNTLYLQMNSLRAEDTAVYYCARRGEGAMDYWGQGTTVTVSSGGGGSGGGGSGGGGSGGGGSDNQLTQSPSFLSASVGDRVTITCRASSSVNYIYWYQQKPGKAPKLLIYYTSNLAPGVPSRFSGSGSGNEYTLTISSLQPEDFATYYCQQFTSSPFTFGQGTKLEIK

SEQ ID NO: 1344 - protein, 246 aa, Artificial Sequence; identical to SEQ ID NO: 110
  source: /note="Description of Artificial Sequence: Synthetic polypeptide"

SEQ ID NO: 1345-2999 - skipped (1655 entries)

SEQ ID NO: 3000 - protein, 107 aa, Artificial Sequence
  source: /note="Description of Artificial Sequence: Synthetic polypeptide"
DIQMTQSPSFLSASVGDRVTITCSASQGISNYLNWYQQKPGKAVKLLIYYTSSLHSGVPSRFSGSGSGTEYTLTISSLQPEDFATYYCQQYSKLPRTFGGGTKVEIK

SEQ ID NO: 3001 - protein, 107 aa, Artificial Sequence
  source: /note="Description of Artificial Sequence: Synthetic polypeptide"
DIQMTQSPSSLSASVGDRVTITCSASQGISNYLNWYQQKPGKAVKLLIYYTSSLHSGVPSRFSGSGSGTDYTLTISSLQPEDFATYYCQQYSKLPRTFGGGTKVEIK

SEQ ID NO: 3002 - protein, 107 aa, Artificial Sequence
  source: /note="Description of Artificial Sequence: Synthetic polypeptide"
DIQMTQSPSSLSASVGDRVTITCSASQGISNYLNWYQQKPGKVVKLLIYYTSSLHSGVPSRFSGSGSGTDYTLTISSLQPEDVATYYCQQYSKLPRTFGGGTKVEIK

SEQ ID NO: 3003 - protein, 107 aa, Artificial Sequence
  source: /note="Description of Artificial Sequence: Synthetic polypeptide"
DIQMTQSPSSLSASVGDRVTITCSASQGISNYLNWYQQKPGQAVKLLIYYTSSLHSGVPSRFSGSGSGTDYTLTISSLQPEDVATYYCQQYSKLPRTFGGGTKVEIK

SEQ ID NO: 3004 - protein, 107 aa, Artificial Sequence
  source: /note="Description of Artificial Sequence: Synthetic polypeptide"
DIQMTQSPSSLSASVGDRVTITCSASQGISNYLNWYQQKPGKAVKLLIYYTSSLHSGVPSRFSGSGSGTDYTFTISSLQPEDIATYYCQQYSKLPRTFGGGTKVEIK

SEQ ID NO: 3005 - protein, 107 aa, Artificial Sequence
  source: /note="Description of Artificial Sequence: Synthetic polypeptide"
DIQMTQSPSSLSASVGDRVTITCSASQGISNYLNWYQQKPGKTVKLLIYYTSSLHSGIPSRFSGSGSGTDYTLTIRSLQPEDFATYYCQQYSKLPRTFGGGTKVEIK

SEQ ID NO: 3006 - protein, 107 aa, Artificial Sequence
  source: /note="Description of Artificial Sequence: Synthetic polypeptide"
AIQMTQSPSSLSASVGDRVTITCSASQGISNYLNWYQQKPGKAVKLLIYYTSSLHSGVPSRFSGSGSGTDYTLTISSLQPEDFATYYCQQYSKLPRTFGGGTKVEIK

SEQ ID NO: 3007 - protein, 107 aa, Artificial Sequence
  source: /note="Description of Artificial Sequence: Synthetic polypeptide"
DIQMTQSPSSVSASVGDRVTITCSASQGISNYLNWYQQKPGKAVKLLIYYTSSLHSGVPSRFSGSGSGTDYTLTISSLQPEDFATYYCQQYSKLPRTFGGGTKVEIK

SEQ ID NO: 3008 - protein, 107 aa, Artificial Sequence
  source: /note="Description of Artificial Sequence: Synthetic polypeptide"
DIQMTQSPSSLSASVGDRVTITCSASQGISNYLNWYQQKPGKAVKRLIYYTSSLHSGVPSRFSGSGSGTEYTLTISNLQPEDFATYYCQQYSKLPRTFGGGTKVEIK

SEQ ID NO: 3009 - protein, 107 aa, Artificial Sequence
  source: /note="Description of Artificial Sequence: Synthetic polypeptide"
AIRMTQSPFSLSASVGDRVTITCSASQGISNYLNWYQQKPAKAVKLFIYYTSSLHSGVPSRFSGSGSGTDYTLTISSLQPEDFATYYCQQYSKLPRTFGGGTKVEIK

SEQ ID NO: 3010 - protein, 107 aa, Artificial Sequence
  source: /note="Description of Artificial Sequence: Synthetic polypeptide"
DIQMTQSPSSLSASVGDRVTITCSASQGISNYLNWYQQKPGKAVKRLIYYTSSLHSGVPSRFSGSGSGTEYTLTISSLQPEDFATYYCQQYSKLPRTFGGGTKVEIK

SEQ ID NO: 3011 - protein, 107 aa, Artificial Sequence
  source: /note="Description of Artificial Sequence: Synthetic polypeptide"
DIQMTQSPSTLSASVGDRVTITCSASQGISNYLNWYQQKPGKAVKLLIYYTSSLHSGVPSRFSGSGSGTEYTLTISSLQPDDFATYYCQQYSKLPRTFGGGTKVEIK

SEQ ID NO: 3012 - protein, 107 aa, Artificial Sequence
  source: /note="Description of Artificial Sequence: Synthetic polypeptide"
DIQMTQSPSSLSASVGDRVTITCSASQGISNYLNWYQQKPGKAVKSLIYYTSSLHSGVPSRFSGSGSGTDYTLTISSLQPEDFATYYCQQYSKLPRTFGGGTKVEIK

SEQ ID NO: 3013 - protein, 107 aa, Artificial Sequence
  source: /note="Description of Artificial Sequence: Synthetic polypeptide"
DIQMTQSPSSLSASVGDRVTITCSASQGISNYLNWYQQKPGKAVKSLIYYTSSLHSGVPSKFSGSGSGTDYTLTISSLQPEDFATYYCQQYSKLPRTFGGGTKVEIK

SEQ ID NO: 3014 - protein, 107 aa, Artificial Sequence
  source: /note="Description of Artificial Sequence: Synthetic polypeptide"
DIQMTQSPSSLSASVGDRVTITCSASQGISNYLNWYQQKPEKAVKSLIYYTSSLHSGVPSRFSGSGSGTDYTLTISSLQPEDFATYYCQQYSKLPRTFGGGTKVEIK

SEQ ID NO: 3015 - protein, 107 aa, Artificial Sequence
  source: /note="Description of Artificial Sequence: Synthetic polypeptide"
DIQMTQSPSAMSASVGDRVTITCSASQGISNYLNWYQQKPGKVVKRLIYYTSSLHSGVPSRFSGSGSGTEYTLTISSLQPEDFATYYCQQYSKLPRTFGGGTKVEIK

SEQ ID NO: 3016 - protein, 107 aa, Artificial Sequence
  source: /note="Description of Artificial Sequence: Synthetic polypeptide"
DIVMTQSPDSLAVSLGERATINCSASQGISNYLNWYQQKPGQPVKLLIYYTSSLHSGVPDRFSGSGSGTDYTLTISSLQAEDVAVYYCQQYSKLPRTFGGGTKVEIK

SEQ ID NO: 3017 - protein, 107 aa, Artificial Sequence
  source: /note="Description of Artificial Sequence: Synthetic polypeptide"
EIVMTQSPGTLSLSPGERATLSCSASQGISNYLNWYQQKPGQAVKLLIYYTSSLHSGIPDRFSGSGSGTDYTLTISRLEPEDFAVYYCQQYSKLPRTFGGGTKVEIK

SEQ ID NO: 3018 - protein, 107 aa, Artificial Sequence
  source: /note="Description of Artificial Sequence: Synthetic polypeptide"
EIVMTQSPPTLSLSPGERVTLSCSASQGISNYLNWYQQKPGQAVKLLIYYTSSLHSGIPARFSGSGSGTDYTLTISSLQPEDFAVYYCQQYSKLPRTFGGGTKVEIK

SEQ ID NO: 3019 - protein, 107 aa, Artificial Sequence
  source: /note="Description of Artificial Sequence: Synthetic polypeptide"
EIVMTQSPPTLSLSPGERVTLSCSASQGISNYLNWYQQKPGQAVKLLIYYTSSLHSSIPARFSGSGSGTDYTLTISSLQPEDFAVYYCQQYSKLPRTFGGGTKVEIK

SEQ ID NO: 3020 - protein, 107 aa, Artificial Sequence
  source: /note="Description of Artificial Sequence: Synthetic polypeptide"
EIVMTQSPATLSLSPGERATLSCSASQGISNYLNWYQQKPGQAVKLLIYYTSSLHSGIPARFSGSGSGTDYTLTISSLEPEDFAVYYCQQYSKLPRTFGGGTKVEIK

SEQ ID NO: 3021 - protein, 107 aa, Artificial Sequence
  source: /note="Description of Artificial Sequence: Synthetic polypeptide"
EIVMTQSPATLSLSPGERATLSCSASQGISNYLNWYQQKPGQAVKLLIYYTSSLHSGIPARFSGSGSGTDYTLTISRLEPEDFAVYYCQQYSKLPRTFGGGTKVEIK

SEQ ID NO: 3022 - protein, 107 aa, Artificial Sequence
  source: /note="Description of Artificial Sequence: Synthetic polypeptide"
EIVMTQSPATLSLSPGERATLSCSASQGISNYLNWYQQKPGQAVKLLIYYTSSLHSGIPDRFSGSGSGTDYTLTISRLEPEDFAVYYCQQYSKLPRTFGGGTKVEIK

SEQ ID NO: 3023 - protein, 107 aa, Artificial Sequence
  source: /note="Description of Artificial Sequence: Synthetic polypeptide"
EIVMTQSPATLSLSPGERATLSCSASQGISNYLNWYQQKPGLAVKLLIYYTSSLHSGIPDRFSGSGSGTDYTLTISRLEPEDFAVYYCQQYSKLPRTFGGGTKVEIK

SEQ ID NO: 3024 - protein, 107 aa, Artificial Sequence
  source: /note="Description of Artificial Sequence: Synthetic polypeptide"
DIQMIQSPSFLSASVGDRVSIICSASQGISNYLNWYLQKPGKSVKLFIYYTSSLHSGVSSRFSGRGSGTDYTLTIISLKPEDFAAYYCQQYSKLPRTFGGGTKVEIK

SEQ ID NO: 3025 - protein, 107 aa, Artificial Sequence
  source: /note="Description of Artificial Sequence: Synthetic polypeptide"
EIVMTQSPATLSLSPGERATLSCSASQGISNYLNWYQQKPGQAVKLLIYYTSSLHSGIPARFSGSGSGTDYTLTISSLQPEDFAVYYCQQYSKLPRTFGGGTKVEIK

SEQ ID NO: 3026 - protein, 107 aa, Artificial Sequence
  source: /note="Description of Artificial Sequence: Synthetic polypeptide"
EIVMTQSPATLSLSPGERATLSCSASQGISNYLNWYQQKPGQAVKLLIYYTSSLHSGIPARFSGSGPGTDYTLTISSLEPEDFAVYYCQQYSKLPRTFGGGTKVEIK

SEQ ID NO: 3027 - protein, 107 aa, Artificial Sequence
  source: /note="Description of Artificial Sequence: Synthetic polypeptide"
DIVMTQTPLSLSVTPGQPASISCSASQGISNYLNWYLQKPGQSVKLLIYYTSSLHSGVPDRFSGSGSGTDYTLKISRVEAEDVGVYYCQQYSKLPRTFGGGTKVEIK

SEQ ID NO: 3028 - protein, 107 aa, Artificial Sequence
  source: /note="Description of Artificial Sequence: Synthetic polypeptide"
DIVMTQTPLSLSVTPGQPASISCSASQGISNYLNWYLQKPGQPVKLLIYYTSSLHSGVPDRFSGSGSGTDYTLKISRVEAEDVGVYYCQQYSKLPRTFGGGTKVEIK

SEQ ID NO: 3029 - protein, 107 aa, Artificial Sequence
  source: /note="Description of Artificial Sequence: Synthetic polypeptide"
DIVMTQSPAFLSVTPGEKVTITCSASQGISNYLNWYQQKPDQAVKLLIYYTSSLHSGVPSRFSGSGSGTDYTFTISSLEAEDAATYYCQQYSKLPRTFGGGTKVEIK

SEQ ID NO: 3030 - protein, 107 aa, Artificial Sequence
  source: /note="Description of Artificial Sequence: Synthetic polypeptide"
DIVMTQSPLSLPVTPGEPASISCSASQGISNYLNWYLQKPGQSVKLLIYYTSSLHSGVPDRFSGSGSGTDYTLKISRVEAEDVGVYYCQQYSKLPRTFGGGTKVEIK

SEQ ID NO: 3031 - protein, 107 aa, Artificial Sequence
  source: /note="Description of Artificial Sequence: Synthetic polypeptide"
DIVMTQTPLSLPVTPGEPASISCSASQGISNYLNWYLQKPGQSVKLLIYYTSSLHSGVPDRFSGSGSGTDYTLKISRVEAEDVGVYYCQQYSKLPRTFGGGTKVEIK

SEQ ID NO: 3032 - protein, 107 aa, Artificial Sequence
  source: /note="Description of Artificial Sequence: Synthetic polypeptide"
EIVMTQSPATLSVSPGERATLSCSASQGISNYLNWYQQKPGQAVKLLIYYTSSLHSGIPARFSGSGSGTEYTLTISILQSEDFAVYYCQQYSKLPRTFGGGTKVEIK

SEQ ID NO: 3033 - protein, 107 aa, Artificial Sequence
  source: /note="Description of Artificial Sequence: Synthetic polypeptide"
EIVMTQSPATLSVSPGERATLSCSASQGISNYLNWYQQKPGQAVKLLIYYTSSLHSGIPARFSGSGSGTEYTLTISSLQSEDFAVYYCQQYSKLPRTFGGGTKVEIK

SEQ ID NO: 3034 - protein, 107 aa, Artificial Sequence
  source: /note="Description of Artificial Sequence: Synthetic polypeptide"
DIVMTQSPLSLPVTLGQPASISCSASQGISNYLNWYQQRPGQSVKRLIYYTSSLHSGVPDRFSGSGSGTDYTLKISRVEAEDVGVYYCQQYSKLPRTFGGGTKVEIK

SEQ ID NO: 3035 - protein, 107 aa, Artificial Sequence
  source: /note="Description of Artificial Sequence: Synthetic polypeptide"
EITMTQSPAFMSATPGDKVNISCSASQGISNYLNWYQQKPGEAVKFIIYYTSSLHSGIPPRFSGSGYGTDYTLTINNIESEDAAYYYCQQYSKLPRTFGGGTKVEIK

SEQ ID NO: 3036 - protein, 107 aa, Artificial Sequence
  source: /note="Description of Artificial Sequence: Synthetic polypeptide"
DIVMTQTPLSSPVTLGQPASISCSASQGISNYLNWYQQRPGQPVKLLIYYTSSLHSGVPDRFSGSGAGTDYTLKISRVEAEDVGVYYCQQYSKLPRTFGGGTKVEIK

SEQ ID NO: 3037 - protein, 107 aa, Artificial Sequence
  source: /note="Description of Artificial Sequence: Synthetic polypeptide"
EIVMTQSPDFQSVTPKEKVTITCSASQGISNYLNWYQQKPDQSVKLLIYYTSSLHSGVPSRFSGSGSGTDYTLTINSLEAEDAATYYCQQYSKLPRTFGGGTKVEIK

SEQ ID NO: 3038 - protein, 107 aa, Artificial Sequence
  source: /note="Description of Artificial Sequence: Synthetic polypeptide"
EIVMTQTPLSLSITPGEQASISCSASQGISNYLNWYLQKARPVVKLLIYYTSSLHSGVPDRFSGSGSGTDYTLKISRVEAEDFGVYYCQQYSKLPRTFGGGTKVEIK

SEQ ID NO: 3039 - protein, 107 aa, Artificial Sequence
  source: /note="Description of Artificial Sequence: Synthetic polypeptide"
EIVMTQTPLSLSITPGEQASMSCSASQGISNYLNWYLQKARPVVKLLIYYTSSLHSGVPDRFSGSGSGTDYTLKISRVEAEDFGVYYCQQYSKLPRTFGGGTKVEIK

SEQ ID NO: 3040 - protein, 120 aa, Artificial Sequence
  source: /note="Description of Artificial Sequence: Synthetic polypeptide"
QVTLKESGPVLVKPTETLTLTCTVSGFSLTAYGVNWVRQPPGKALEWLGMIWGDGNTDYNSALKSRLTISKDNSKSQVVLTMTNMDPVDTATYYCARDRVTATLYAMDYWGQGTLVTVSS

SEQ ID NO: 3041 - protein, 120 aa, Artificial Sequence
  source: /note="Description of Artificial Sequence: Synthetic polypeptide"
QVTLKESGPALVKPTETLTLTCTVSGFSLTAYGVNWVRQPPGKALEWLGMIWGDGNTDYNSALKSRLIISKDNSKSQVVLTMTNMDPVDTATYYCARDRVTATLYAMDYWGQGTLVTVSS

SEQ ID NO: 3042 - protein, 120 aa, Artificial Sequence
  source: /note="Description of Artificial Sequence: Synthetic polypeptide"
QVTLKESGPALVKPTQTLTLTCTVSGFSLTAYGVNWVRQPPGKALEWLGMIWGDGNTDYNSALKSRLTISKDNSKSQVVLTMTNMDPVDTATYYCARDRVTATLYAMDYWGQGTLVTVSS

SEQ ID NO: 3043 - protein, 120 aa, Artificial Sequence
  source: /note="Description of Artificial Sequence: Synthetic polypeptide"
QVQLQESGPGLVKPSGTLSLTCAVSGFSLTAYGVNWVRQPPGKGLEWLGMIWGDGNTDYNSALKSRLTISKDNSKSQVSLKLSSVTAADTAVYYCARDRVTATLYAMDYWGQGTLVTVSS

SEQ ID NO: 3044 - protein, 120 aa, Artificial Sequence
  source: /note="Description of Artificial Sequence: Synthetic polypeptide"
QVTLKESGPTLVKPTQTLTLTCTVSGFSLTAYGVNWVRQPPGKALEWLGMIWGDGNTDYNSALKSRLTITKDNSKSQVVLTMTNMDPVDTATYYCARDRVTATLYAMDYWGQGTLVTVSS

SEQ ID NO: 3045 - protein, 120 aa, Artificial Sequence
  source: /note="Description of Artificial Sequence: Synthetic polypeptide"
QVTLKESGPALVKPTQTLTLTCTVSGFSLTAYGVNWVRQPPGKALEWLGMIWGDGNTDYNSALKSRLTITKDNSKSQVVLTMTNMDPVDTATYYCARDRVTATLYAMDYWGQGTLVTVSS

SEQ ID NO: 3046 - protein, 120 aa, Artificial Sequence
  source: /note="Description of Artificial Sequence: Synthetic polypeptide"
QVQLQESGPGLVKPSQTLSLTCTVSGFSLTAYGVNWVRQPPGKGLEWLGMIWGDGNTDYNSALKSRLTISKDNSKSQVSLKLSSVTAADTAVYYCARDRVTATLYAMDYWGQGTLVTVSS

SEQ ID NO: 3047 - protein, 120 aa, Artificial Sequence
  source: /note="Description of Artificial Sequence: Synthetic polypeptide"
QVQLQESGPGLVKPSETLSLTCTVSGFSLTAYGVNWVRQPPGKGLEWLGMIWGDGNTDYNSALKSRLTISKDNSKSQVSLKLSSVTAADTAVYYCARDRVTATLYAMDYWGQGTLVTVSS

SEQ ID NO: 3048 - protein, 120 aa, Artificial Sequence
  source: /note="Description of Artificial Sequence: Synthetic polypeptide"
QVQLQESGPGLVKPSQTLSLTCAVSGFSLTAYGVNWVRQPPGKGLEWLGMIWGDGNTDYNSALKSRLTISKDNSKSQVSLKLSSVTAADTAVYYCARDRVTATLYAMDYWGQGTLVTVSS

SEQ ID NO: 3049 - protein, 120 aa, Artificial Sequence
  source: /note="Description of Artificial Sequence: Synthetic polypeptide"
QVQLQESGPGLVKPSDTLSLTCTVSGFSLTAYGVNWVRQPPGKGLEWLGMIWGDGNTDYNSALKSRLTISKDNSKSQVSLKLSSVTAADTAVYYCARDRVTATLYAMDYWGQGTLVTVSS

SEQ ID NO: 3050 - protein, 120 aa, Artificial Sequence
  source: /note="Description of Artificial Sequence: Synthetic polypeptide"
QVQLQESGPGLVKPSQTLSLTCTVSGFSLTAYGVNWVRQHPGKGLEWLGMIWGDGNTDYNSALKSRLTISKDNSKSQVSLKLSSVTAADTAVYYCARDRVTATLYAMDYWGQGTLVTVSS

SEQ ID NO: 3051 - protein, 120 aa, Artificial Sequence
  source: /note="Description of Artificial Sequence: Synthetic polypeptide"
QVQLQESGPGLVKPSQTLSLTCTVSGFSLTAYGVNWVRQPAGKGLEWLGMIWGDGNTDYNSALKSRLTISKDNSKSQVSLKLSSVTAADTAVYYCARDRVTATLYAMDYWGQGTLVTVSS

SEQ ID NO: 3052 - protein, 120 aa, Artificial Sequence
  source: /note="Description of Artificial Sequence: Synthetic polypeptide"
QVQLQESGPGLVKPSQTLSLTCAVSGFSLTAYGVNWVRQPPGKGLEWLGMIWGDGNTDYNSALKSRLTISKDNSKSQVSLKLSSVTAVDTAVYYCARDRVTATLYAMDYWGQGTLVTVSS

SEQ ID NO: 3053 - protein, 120 aa, Artificial Sequence
  source: /note="Description of Artificial Sequence: Synthetic polypeptide"
QVQLQESGPGLVKPSETLSLTCTVSGFSLTAYGVNWVRQPPGKGLEWLGMIWGDGNTDYNSALKSRLTISKDNSKSHVSLKLSSVTAADTAVYYCARDRVTATLYAMDYWGQGTLVTVSS

SEQ ID NO: 3054 - protein, 120 aa, Artificial Sequence
  source: /note="Description of Artificial Sequence: Synthetic polypeptide"
QVQLQESGPGLVKPSETLSLTCAVSGFSLTAYGVNWVRQPPGKGLEWLGMIWGDGNTDYNSALKSRLTISKDNSKSQVSLKLSSVTAADTAVYYCARDRVTATLYAMDYWGQGTLVTVSS

SEQ ID NO: 3055 - protein, 120 aa, Artificial Sequence
  source: /note="Description of Artificial Sequence: Synthetic polypeptide"
QVQLQESGPGLVKPSQTLSLTCAVYGFSLTAYGVNWVRQPPGKGLEWLGMIWGDGNTDYNSALKSRLTISKDNSKSQVSLKLSSVTAADTAVYYCARDRVTATLYAMDYWGQGTLVTVSS

SEQ ID NO: 3056 - protein, 120 aa, Artificial Sequence
  source: /note="Description of Artificial Sequence: Synthetic polypeptide"
RVQLQESGPGLVKPSETLSLTCTVSGFSLTAYGVNWVRQPPGKGLEWLGMIWGDGNTDYNSALKSRLTISKDNSKSQVPLKLSSVTAADTAVYYCARDRVTATLYAMDYWGQGTLVTVSS

SEQ ID NO: 3057 - protein, 120 aa, Artificial Sequence
  source: /note="Description of Artificial Sequence: Synthetic polypeptide"
QVQLQESGPGLVKPSQTLSLTCTVSGFSLTAYGVNWVRQHPGKGLEWLGMIWGDGNTDYNSALKSLLTISKDNSKSQVSLKLSSVTAADTAVYYCARDRVTATLYAMDYWGQGTLVTVSS

SEQ ID NO: 3058 - protein, 120 aa, Artificial Sequence
  source: /note="Description of Artificial Sequence: Synthetic polypeptide"
QVQLQESGPGLVKPSDTLSLTCAVSGFSLTAYGVNWVRQPPGKGLEWLGMIWGDGNTDYNSALKSRLTISKDNSKSQVSLKLSSVTALDTAVYYCARDRVTATLYAMDYWGQGTLVTVSS

SEQ ID NO: 3059 - protein, 120 aa, Artificial Sequence
  source: /note="Description of Artificial Sequence: Synthetic polypeptide"
QVQLQESGPGLVKPSDTLSLTCAVSGFSLTAYGVNWVRQPPGKGLEWLGMIWGDGNTDYNSALKSRLTISKDNSKSQVSLKLSSVTAVDTAVYYCARDRVTATLYAMDYWGQGTLVTVSS

SEQ ID NO: 3060 - protein, 120 aa, Artificial Sequence
  source: /note="Description of Artificial Sequence: Synthetic polypeptide"
QVQLQESGSGLVKPSQTLSLTCAVSGFSLTAYGVNWVRQPPGKGLEWLGMIWGDGNTDYNSALKSRLTISKDNSKSQVSLKLSSVTAADTAVYYCARDRVTATLYAMDYWGQGTLVTVSS

SEQ ID NO: 3061 - protein, 120 aa, Artificial Sequence
  source: /note="Description of Artificial Sequence: Synthetic polypeptide"
EVQLVESGGGLVQPGRSLRLSCTVSGFSLTAYGVNWVRQAPGKGLEWLGMIWGDGNTDYNSALKSRLTISKDNSKSIVYLQMNSLKTEDTAVYYCARDRVTATLYAMDYWGQGTLVTVSS

SEQ ID NO: 3062 - protein, 120 aa, Artificial Sequence
  source: /note="Description of Artificial Sequence: Synthetic polypeptide"
EVQLVESGGGLVQPGPSLRLSCTVSGFSLTAYGVNWVRQAPGKGLEWLGMIWGDGNTDYNSALKSRLTISKDNSKSIVYLQMNSLKTEDTAVYYCARDRVTATLYAMDYWGQGTLVTVSS

SEQ ID NO: 3063 - protein, 120 aa, Artificial Sequence
  source: /note="Description of Artificial Sequence: Synthetic polypeptide"
QVQLQESGSGLVKPSQTLSLTCAVSGFSLTAYGVNWVRQSPGKGLEWLGMIWGDGNTDYNSALKSRLTISKDNSKSQVSLKLSSVTAADTAVYYCARDRVTATLYAMDYWGQGTLVTVSS

SEQ ID NO: 3064 - protein, 120 aa, Artificial Sequence
  source: /note="Description of Artificial Sequence: Synthetic polypeptide"
QVQLQESGPGLVKPSETLSLTCTVSGFSLTAYGVNWVRQPAGKGLEWLGMIWGDGNTDYNSALKSRLTISKDNSKSQVSLKLSSVTAADTAVYYCARDRVTATLYAMDYWGQGTLVTVSS

SEQ ID NO: 3065 - protein, 120 aa, Artificial Sequence
  source: /note="Description of Artificial Sequence: Synthetic polypeptide"
EVQLVESGGGLVKPGRSLRLSCTVSGFSLTAYGVNWVRQAPGKGLEWLGMIWGDGNTDYNSALKSRLTISKDNSKSIVYLQMNSLKTEDTAVYYCARDRVTATLYAMDYWGQGTLVTVSS

SEQ ID NO: 3066 - protein, 120 aa, Artificial Sequence
  source: /note="Description of Artificial Sequence: Synthetic polypeptide"
QVQLQESGPGLVKPSETLSLTCAVYGFSLTAYGVNWVRQPPGKGLEWLGMIWGDGNTDYNSALKSRLTISKDNSKSQVYLKLSSVTAADTAVYYCARDRVTATLYAMDYWGQGTLVTVSS

SEQ ID NO: 3067 - protein, 120 aa, Artificial Sequence
  source: /note="Description of Artificial Sequence: Synthetic polypeptide"
QVQLQESGPGLVKPSDTLSLTCAVSGFSLTAYGVNWVRQPPGKGLEWLGMIWGDGNTDYNSALKSRLTISKDNSKSQVSLKLSSVTAVDTGVYYCARDRVTATLYAMDYWGQGTLVTVSS

SEQ ID NO: 3068 - protein, 120 aa, Artificial Sequence
  source: /note="Description of Artificial Sequence: Synthetic polypeptide"
EVQLVESGGGLVQPGGSLRLSCAVSGFSLTAYGVNWVRQAPGKGLEWLGMIWGDGNTDYNSALKSRLTISKDNSKSSVYLQMNSLKTEDTAVYYCARDRVTATLYAMDYWGQGTLVTVSS

SEQ ID NO: 3069 - protein, 120 aa, Artificial Sequence
  source: /note="Description of Artificial Sequence: Synthetic polypeptide"
EVQLVESGGGLVKPGGSLRLSCAVSGFSLTAYGVNWVRQAPGKGLEWLGMIWGDGNTDYNSALKSRLTISKDNSKSTVYLQMNSLKTEDTAVYYCARDRVTATLYAMDYWGQGTLVTVSS

SEQ ID NO: 3070 - protein, 120 aa, Artificial Sequence
  source: /note="Description of Artificial Sequence: Synthetic polypeptide"
QVQLQQSGPGLVKPSQTLSLTCAVSGFSLTAYGVNWVRQSPSRGLEWLGMIWGDGNTDYNSALKSRLTINKDNSKSQVSLQLNSVTPEDTAVYYCARDRVTATLYAMDYWGQGTLVTVSS

SEQ ID NO: 3071 - protein, 120 aa, Artificial Sequence
  source: /note="Description of Artificial Sequence: Synthetic polypeptide"
QVQLVESGGGLVQPGGSLRLSCSVSGFSLTAYGVNWVRQAPGKGLEWLGMIWGDGNTDYNSALKSRLTISKDNSKSTVYLQMNSLRAEDTAVYYCARDRVTATLYAMDYWGQGTLVTVSS

SEQ ID NO: 3072 - protein, 120 aa, Artificial Sequence
  source: /note="Description of Artificial Sequence: Synthetic polypeptide"
QVQLQQWGAGLLKPSETLSLTCAVYGFSLTAYGVNWVRQPPGKGLEWLGMIWGDGNTDYNSALKSRLTISKDNSKSQVSLKLSSVTAADTAVYYCARDRVTATLYAMDYWGQGTLVTVSS

SEQ ID NO: 3073 - protein, 120 aa, Artificial Sequence
  source: /note="Description of Artificial Sequence: Synthetic polypeptide"
QVQLVESGGGVVQPGRSLRLSCAVSGFSLTAYGVNWVRQAPGKGLEWLGMIWGDGNTDYNSALKSRLTISKDNSTSTVFLQMNSLRAEDTAVYYCARDRVTATLYAMDYWGQGTLVTVSS

SEQ ID NO: 3074 - protein, 120 aa, Artificial Sequence
  source: /note="Description of Artificial Sequence: Synthetic polypeptide"
EVQLVESGGGLVQPGGSLRLSCAVSGFSLTAYGVNWVRQAPGKGLEWLGMIWGDGNTDYNSALKSRLTISKDNSKSTVYLQMNSLRAEDTAVYYCARDRVTATLYAMDYWGQGTLVTVSS

SEQ ID NO: 3075 - protein, 120 aa, Artificial Sequence
  source: /note="Description of Artificial Sequence: Synthetic polypeptide"
EVQLVESGGGLVQPGGSLRLSCAVSGFSLTAYGVNWVRQAPGKGLEWLGMIWGDGNTDYNSALKSRLTISKDNAKSSVYLQMNSLRDEDTAVYYCARDRVTATLYAMDYWGQGTLVTVSS

SEQ ID NO: 3076 - protein, 120 aa, Artificial Sequence
  source: /note="Description of Artificial Sequence: Synthetic polypeptide"
EVQLLESGGGLVQPGGSLRLSCAVSGFSLTAYGVNWVRQAPGKGLEWLGMIWGDGNTDYNSALKSRLTISKDNSKSTVYLQMNSLRAEDTAVYYCARDRVTATLYAMDYWGQGTLVTVSS

SEQ ID NO: 3077 - protein, 120 aa, Artificial Sequence
  source: /note="Description of Artificial Sequence: Synthetic polypeptide"
QVQLVESGGGLVKPGGSLRLSCAVSGFSLTAYGVNWVRQAPGKGLEWLGMIWGDGNTDYNSALKSRLTISKDNAKSSVYLQMNSLRAEDTAVYYCARDRVTATLYAMDYWGQGTLVTVSS

SEQ ID NO: 3078 - protein, 120 aa, Artificial Sequence
  source: /note="Description of Artificial Sequence: Synthetic polypeptide"
EVQLVESGGGLVQPGGSLKLSCAVSGFSLTAYGVNWVRQASGKGLEWLGMIWGDGNTDYNSALKSRLTISKDNSKSTVYLQMNSLKTEDTAVYYCARDRVTATLYAMDYWGQGTLVTVSS

SEQ ID NO: 3079 - protein, 120 aa, Artificial Sequence
  source: /note="Description of Artificial Sequence: Synthetic polypeptide"
QVQLLESGGGLVKPGGSLRLSCAVSGFSLTAYGVNWVRQAPGKGLEWLGMIWGDGNTDYNSALKSRLTISKDNAKSSVYLQMNSLRAEDTAVYYCARDRVTATLYAMDYWGQGTLVTVSS

SEQ ID NO: 3080 - protein, 120 aa, Artificial Sequence
  source: /note="Description of Artificial Sequence: Synthetic polypeptide"
QVQLVESGGGVVQPGRSLRLSCAVSGFSLTAYGVNWVRQAPGKGLEWLGMIWGDGNTDYNSALKSRLTISKDNSKSTVYLQMNSLRAEDTAVYYCARDRVTATLYAMDYWGQGTLVTVSS

SEQ ID NO: 3081 - protein, 120 aa, Artificial Sequence
  source: /note="Description of Artificial Sequence: Synthetic polypeptide"
QVQLVESGGGVVQPGRSLRLSCAVSGFSLTAYGVNWVRQAPGKGLEWLGMIWGDGNTDYNSALKSRLTISKDNSKSRVYLQMNSLRAEDTAVYYCARDRVTATLYAMDYWGQGTLVTVSS

SEQ ID NO: 3082 - protein, 120 aa, Artificial Sequence
  source: /note="Description of Artificial Sequence: Synthetic polypeptide"
QVQLVESGGGVVQPGRSLRLSCAVSGFSLTAYGVNWVRQAPGKGLEWLGMIWGDGNTDYNSALKSRLAISKDNSKSTVYLQMNSLRAEDTAVYYCARDRVTATLYAMDYWGQGTLVTVSS

SEQ ID NO: 3083 - protein, 120 aa, Artificial Sequence
  source: /note="Description of Artificial Sequence: Synthetic polypeptide"
QVQLVESGGGVVQPGGSLRLSCAVSGFSLTAYGVNWVRQAPGKGLEWLGMIWGDGNTDYNSALKSRLTISKDNSKSTVYLQMNSLRAEDTAVYYCARDRVTATLYAMDYWGQGTLVTVSS

SEQ ID NO: 3084 - protein, 120 aa, Artificial Sequence
  source: /note="Description of Artificial Sequence: Synthetic polypeptide"
EVQLVESGGGLVQPGGSLRLSCAVSGFSLTAYGVNWVRQAPGKGLEWLGMIWGDGNTDYNSALKSRLTISKDNAKSTVYLQMNSLRAEDTAVYYCARDRVTATLYAMDYWGQGTLVTVSS

SEQ ID NO: 3085 - protein, 120 aa, Artificial Sequence
  source: /note="Description of Artificial Sequence: Synthetic polypeptide"
EVQLVESGGGLVQPGGSLRLSCAVSGFSLTAYGVNWVRQAPGKGLEWLGMIWGDGNTDYNSALKSRLTISKDNAKSSVYLQMNSLRAEDTAVYYCARDRVTATLYAMDYWGQGTLVTVSS

SEQ ID NO: 3086 - protein, 120 aa, Artificial Sequence
  source: /note="Description of Artificial Sequence: Synthetic polypeptide"
EVQLVESGGVVVQPGGSLRLSCAVSGFSLTAYGVNWVRQAPGKGLEWLGMIWGDGNTDYNSALKSRLTISKDNSKSSVYLQMNSLRTEDTALYYCARDRVTATLYAMDYWGQGTLVTVSS

SEQ ID NO: 3087 - protein, 120 aa, Artificial Sequence
  source: /note="Description of Artificial Sequence: Synthetic polypeptide"
EVQLVESGGGLVQPGGSLRLSCAVSGFSLTAYGVNWVRQAPGKGLEWLGMIWGDGNTDYNSALKSRLTISKHNSKSTVYLQMNSLRAEDTAVYYCARDRVTATLYAMDYWGQGTLVTVSS

SEQ ID NO: 3088 - protein, 120 aa, Artificial Sequence
  source: /note="Description of Artificial Sequence: Synthetic polypeptide"
EVQLVESGGGLVKPGGSLRLSCAVSGFSLTAYGVNWVRQAPGKGLEWLGMIWGDGNTDYNSALKSRLTISKDNAKSSVYLQMNSLRAEDTAVYYCARDRVTATLYAMDYWGQGTLVTVSS

SEQ ID NO: 3089 - protein, 120 aa, Artificial Sequence
  source: /note="Description of Artificial Sequence: Synthetic polypeptide"
EVQLVESGGGLIQPGGSLRLSCAVSGFSLTAYGVNWVRQPPGKGLEWLGMIWGDGNTDYNSALKSRLTISKDNSKSTVYLQMNSLRAEDTAVYYCARDRVTATLYAMDYWGQGTLVTVSS

SEQ ID NO: 3090 - skipped

SEQ ID NO: 3091 - protein, 119 aa, Artificial Sequence
  source: /note="Description of Artificial Sequence: Synthetic polypeptide"
QVQLQQSGPELVKPGASVKISCKASGYAFSSSWMNWVKQRPGQGLEWIGRIYPGDGDTKYNGKFKGKATLTADKSSSTAYMHLSSLTSVDSAVYFCARRGTGGWYFDVWGAGTTVTVSS

SEQ ID NO: 3092 - protein, 111 aa, Artificial Sequence
  source: /note="Description of Artificial Sequence: Synthetic polypeptide"
DIVLTQSPASLAVSLGQRATISCRASESVDSSGNSFMHWYQQKPGQPPQLLIYRASNLESGIPARFSGSGSRTDFTLTINPVEADDVATFYCQQSFDDPFTFGSGTKLEIK

SEQ ID NO: 3093 - protein, 111 aa, Artificial Sequence
  source: /note="Description of Artificial Sequence: Synthetic polypeptide"
DIVLTQSPDSLAVSLGERATINCRASESVDSSGNSFMHWYQQKPGQPPQLLIYRASNLESGVPDRFSGSGSRTDFTLTISSLQAEDVAVYYCQQSFDDPFTFGQGTKLEIK

SEQ ID NO: 3094 - protein, 111 aa, Artificial Sequence
  source: /note="Description of Artificial Sequence: Synthetic polypeptide"
EIVLTQSPATLSLSPGERATLSCRASESVDSSGNSFMHWYQQKPGQAPQLLIYRASNLESGIPARFSGSGSRTDFTLTISSLEPEDFAVYYCQQSFDDPFTFGQGTKLEIK

SEQ ID NO: 3095 - protein, 111 aa, Artificial Sequence
  source: /note="Description of Artificial Sequence: Synthetic polypeptide"
EIVLTQSPATLSLSPGERATLSCRASESVDSSGNSFMHWYQQKPGQAPQLLIYRASNLESGIPARFSGSGSRTDFTLTISRLEPEDFAVYYCQQSFDDPFTFGQGTKLEIK

SEQ ID NO: 3096 - protein, 111 aa, Artificial Sequence
  source: /note="Description of Artificial Sequence: Synthetic polypeptide"
EIVLTQSPATLSLSPGERATLSCRASESVDSSGNSFMHWYQQKPGQAPQLLIYRASNLESGIPARFSGSGSRTDFTLTISSLQPEDFAVYYCQQSFDDPFTFGQGTKLEIK

SEQ ID NO: 3097 - protein, 111 aa, Artificial Sequence
  source: /note="Description of Artificial Sequence: Synthetic polypeptide"
DIQLTQSPSSLSASVGDRVTITCRASESVDSSGNSFMHWYQQKPGQAPQLLIYRASNLESGVPSRFSGSGSRTDFTLTISSLQPEDVATYYCQQSFDDPFTFGQGTKLEIK

SEQ ID NO: 3098 - protein, 111 aa, Artificial Sequence
  source: /note="Description of Artificial Sequence: Synthetic polypeptide"
EIVLTQSPATLSLSPGERATLSCRASESVDSSGNSFMHWYQQKPGQAPQLLIYRASNLESGIPARFSGSGPRTDFTLTISSLEPEDFAVYYCQQSFDDPFTFGQGTKLEIK

SEQ ID NO: 3099 - protein, 111 aa, Artificial Sequence
  source: /note="Description of Artificial Sequence: Synthetic polypeptide"
EIVLTQSPATLSLSPGERATLSCRASESVDSSGNSFMHWYQQKPGQAPQLLIYRASNLESGIPDRFSGSGSRTDFTLTISRLEPEDFAVYYCQQSFDDPFTFGQGTKLEIK

SEQ ID NO: 3100 - protein, 111 aa, Artificial Sequence
  source: /note="Description of Artificial Sequence: Synthetic polypeptide"
DIQLTQSPSSLSASVGDRVTITCRASESVDSSGNSFMHWYQQKPGKVPQLLIYRASNLESGVPSRFSGSGSRTDFTLTISSLQPEDVATYYCQQSFDDPFTFGQGTKLEIK

SEQ ID NO: 3101 - protein, 111 aa, Artificial Sequence
  source: /note="Description of Artificial Sequence: Synthetic polypeptide"
DIQLTQSPSSLSASVGDRVTITCRASESVDSSGNSFMHWYQQKPGKTPQLLIYRASNLESGIPSRFSGSGSRTDFTLTIRSLQPEDFATYYCQQSFDDPFTFGQGTKLEIK

SEQ ID NO: 3102 - protein, 111 aa, Artificial Sequence
  source: /note="Description of Artificial Sequence: Synthetic polypeptide"
EIVLTQSPGTLSLSPGERATLSCRASESVDSSGNSFMHWYQQKPGQAPQLLIYRASNLESGIPDRFSGSGSRTDFTLTISRLEPEDFAVYYCQQSFDDPFTFGQGTKLEIK

SEQ ID NO: 3103 - protein, 111 aa, Artificial Sequence
  source: /note="Description of Artificial Sequence: Synthetic polypeptide"
EIVLTQSPATLSLSPGERATLSCRASESVDSSGNSFMHWYQQKPGLAPQLLIYRASNLESGIPDRFSGSGSRTDFTLTISRLEPEDFAVYYCQQSFDDPFTFGQGTKLEIK

SEQ ID NO: 3104 - protein, 111 aa, Artificial Sequence
  source: /note="Description of Artificial Sequence: Synthetic polypeptide"
DIQLTQSPSSLSASVGDRVTITCRASESVDSSGNSFMHWYQQKPGKAPQLLIYRASNLESGVPSRFSGSGSRTDFTLTISSLQPEDFATYYCQQSFDDPFTFGQGTKLEIK

SEQ ID NO: 3105 - protein, 111 aa, Artificial Sequence
  source: /note="Description of Artificial Sequence: Synthetic polypeptide"
DIQLTQSPSSVSASVGDRVTITCRASESVDSSGNSFMHWYQQKPGKAPQLLIYRASNLESGVPSRFSGSGSRTDFTLTISSLQPEDFATYYCQQSFDDPFTFGQGTKLEIK

SEQ ID NO: 3106 - protein, 111 aa, Artificial Sequence
  source: /note="Description of Artificial Sequence: Synthetic polypeptide"
AIQLTQSPSSLSASVGDRVTITCRASESVDSSGNSFMHWYQQKPGKAPQLLIYRASNLESGVPSRFSGSGSRTDFTLTISSLQPEDFATYYCQQSFDDPFTFGQGTKLEIK

SEQ ID NO: 3107 - protein, 111 aa, Artificial Sequence
  source: /note="Description of Artificial Sequence: Synthetic polypeptide"
DIQLTQSPSFLSASVGDRVTITCRASESVDSSGNSFMHWYQQKPGKAPQLLIYRASNLESGVPSRFSGSGSRTEFTLTISSLQPEDFATYYCQQSFDDPFTFGQGTKLEIK

SEQ ID NO: 3108 - protein, 111 aa, Artificial Sequence
  source: /note="Description of Artificial Sequence: Synthetic polypeptide"
DIQLTQSPSSLSASVGDRVTITCRASESVDSSGNSFMHWYQQKPGKAPQLLIYRASNLESGVPSRFSGSGSRTDFTFTISSLQPEDIATYYCQQSFDDPFTFGQGTKLEIK

SEQ ID NO: 3109 - protein, 111 aa, Artificial Sequence
  source: /note="Description of Artificial Sequence: Synthetic polypeptide"
EIVLTQSPATLSVSPGERATLSCRASESVDSSGNSFMHWYQQKPGQAPQLLIYRASNLESGIPARFSGSGSRTEFTLTISILQSEDFAVYYCQQSFDDPFTFGQGTKLEIK

SEQ ID NO: 3110 - protein, 111 aa, Artificial Sequence
  source: /note="Description of Artificial Sequence: Synthetic polypeptide"
EIVLTQSPATLSVSPGERATLSCRASESVDSSGNSFMHWYQQKPGQAPQLLIYRASNLESGIPARFSGSGSRTEFTLTISSLQSEDFAVYYCQQSFDDPFTFGQGTKLEIK

SEQ ID NO: 3111 - protein, 111 aa, Artificial Sequence
  source: /note="Description of Artificial Sequence: Synthetic polypeptide"
AIRLTQSPFSLSASVGDRVTITCRASESVDSSGNSFMHWYQQKPAKAPQLFIYRASNLESGVPSRFSGSGSRTDFTLTISSLQPEDFATYYCQQSFDDPFTFGQGTKLEIK

SEQ ID NO: 3112 - protein, 111 aa, Artificial Sequence
  source: /note="Description of Artificial Sequence: Synthetic polypeptide"
DIQLTQSPSSLSASVGDRVTITCRASESVDSSGNSFMHWYQQKPGKAPQSLIYRASNLESGVPSRFSGSGSRTDFTLTISSLQPEDFATYYCQQSFDDPFTFGQGTKLEIK

SEQ ID NO: 3113 - protein, 111 aa, Artificial Sequence
  source: /note="Description of Artificial Sequence: Synthetic polypeptide"
DIQLTQSPSSLSASVGDRVTITCRASESVDSSGNSFMHWYQQKPGKAPQRLIYRASNLESGVPSRFSGSGSRTEFTLTISNLQPEDFATYYCQQSFDDPFTFGQGTKLEIK

SEQ ID NO: 3114 - protein, 111 aa, Artificial Sequence
  source: /note="Description of Artificial Sequence: Synthetic polypeptide"
DIQLTQSPSTLSASVGDRVTITCRASESVDSSGNSFMHWYQQKPGKAPQLLIYRASNLESGVPSRFSGSGSRTEFTLTISSLQPDDFATYYCQQSFDDPFTFGQGTKLEIK

SEQ ID NO: 3115 - protein, 111 aa, Artificial Sequence
  source: /note="Description of Artificial Sequence: Synthetic polypeptide"
EIVLTQSPDFQSVTPKEKVTITCRASESVDSSGNSFMHWYQQKPDQSPQLLIYRASNLESGVPSRFSGSGSRTDFTLTINSLEAEDAATYYCQQSFDDPFTFGQGTKLEIK

SEQ ID NO: 3116 - protein, 111 aa, Artificial Sequence
  source: /note="Description of Artificial Sequence: Synthetic polypeptide"
DIQLTQSPSSLSASVGDRVTITCRASESVDSSGNSFMHWYQQKPGKAPQSLIYRASNLESGVPSKFSGSGSRTDFTLTISSLQPEDFATYYCQQSFDDPFTFGQGTKLEIK

SEQ ID NO: 3117 - protein, 111 aa, Artificial Sequence
  source: /note="Description of Artificial Sequence: Synthetic polypeptide"
DIQLTQSPSSLSASVGDRVTITCRASESVDSSGNSFMHWYQQKPGKAPQRLIYRASNLESGVPSRFSGSGSRTEFTLTISSLQPEDFATYYCQQSFDDPFTFGQGTKLEIK

SEQ ID NO: 3118 - protein, 111 aa, Artificial Sequence
  source: /note="Description of Artificial Sequence: Synthetic polypeptide"
DIVLTQTPLSLSVTPGQPASISCRASESVDSSGNSFMHWYLQKPGQPPQLLIYRASNLESGVPDRFSGSGSRTDFTLKISRVEAEDVGVYYCQQSFDDPFTFGQGTKLEIK

SEQ ID NO: 3119 - protein, 111 aa, Artificial Sequence
  source: /note="Description of Artificial Sequence: Synthetic polypeptide"
DIQLTQSPSSLSASVGDRVTITCRASESVDSSGNSFMHWYQQKPEKAPQSLIYRASNLESGVPSRFSGSGSRTDFTLTISSLQPEDFATYYCQQSFDDPFTFGQGTKLEIK

SEQ ID NO: 3120 - protein, 111 aa, Artificial Sequence
  source: /note="Description of Artificial Sequence: Synthetic polypeptide"
EIVLTQSPPTLSLSPGERVTLSCRASESVDSSGNSFMHWYQQKPGQAPQLLIYRASNLESGIPARFSGSGSRTDFTLTISSLQPEDFAVYYCQQSFDDPFTFGQGTKLEIK

SEQ ID NO: 3121 - protein, 111 aa, Artificial Sequence
  source: /note="Description of Artificial Sequence: Synthetic polypeptide"
DIQLTQSPSAMSASVGDRVTITCRASESVDSSGNSFMHWYQQKPGKVPQRLIYRASNLESGVPSRFSGSGSRTEFTLTISSLQPEDFATYYCQQSFDDPFTFGQGTKLEIK

SEQ ID NO: 3122 - protein, 111 aa, Artificial Sequence
  source: /note="Description of Artificial Sequence: Synthetic polypeptide"
DIVLTQSPLSLPVTPGEPASISCRASESVDSSGNSFMHWYLQKPGQSPQLLIYRASNLESGVPDRFSGSGSRTDFTLKISRVEAEDVGVYYCQQSFDDPFTFGQGTKLEIK

SEQ ID NO: 3123 - protein, 111 aa, Artificial Sequence
  source: /note="Description of Artificial Sequence: Synthetic polypeptide"
DIVLTQTPLSLPVTPGEPASISCRASESVDSSGNSFMHWYLQKPGQSPQLLIYRASNLESGVPDRFSGSGSRTDFTLKISRVEAEDVGVYYCQQSFDDPFTFGQGTKLEIK

SEQ ID NO: 3124 - protein, 111 aa, Artificial Sequence
  source: /note="Description of Artificial Sequence: Synthetic polypeptide"
DIVLTQTPLSLSVTPGQPASISCRASESVDSSGNSFMHWYLQKPGQSPQLLIYRASNLESGVPDRFSGSGSRTDFTLKISRVEAEDVGVYYCQQSFDDPFTFGQGTKLEIK

SEQ ID NO: 3125 - protein, 111 aa, Artificial Sequence
  source: /note="Description of Artificial Sequence: Synthetic polypeptide"
EIVLTQSPPTLSLSPGERVTLSCRASESVDSSGNSFMHWYQQKPGQAPQLLIYRASNLESSIPARFSGSGSRTDFTLTISSLQPEDFAVYYCQQSFDDPFTFGQGTKLEIK

SEQ ID NO: 3126 - protein, 111 aa, Artificial Sequence
  source: /note="Description of Artificial Sequence: Synthetic polypeptide"
DIVLTQSPLSLPVTLGQPASISCRASESVDSSGNSFMHWYQQRPGQSPQRLIYRASNLESGVPDRFSGSGSRTDFTLKISRVEAEDVGVYYCQQSFDDPFTFGQGTKLEIK

SEQ ID NO: 3127 - protein, 111 aa, Artificial Sequence
  source: /note="Description of Artificial Sequence: Synthetic polypeptide"
DIVLTQTPLSSPVTLGQPASISCRASESVDSSGNSFMHWYQQRPGQPPQLLIYRASNLESGVPDRFSGSGARTDFTLKISRVEAEDVGVYYCQQSFDDPFTFGQGTKLEIK

SEQ ID NO: 3128 - protein, 111 aa, Artificial Sequence
  source: /note="Description of Artificial Sequence: Synthetic polypeptide"
DIVLTQSPAFLSVTPGEKVTITCRASESVDSSGNSFMHWYQQKPDQAPQLLIYRASNLESGVPSRFSGSGSRTDFTFTISSLEAEDAATYYCQQSFDDPFTFGQGTKLEIK

SEQ ID NO: 3129 - protein, 111 aa, Artificial Sequence
  source: /note="Description of Artificial Sequence: Synthetic polypeptide"
DIQLIQSPSFLSASVGDRVSIICRASESVDSSGNSFMHWYLQKPGKSPQLFIYRASNLESGVSSRFSGRGSRTDFTLTIISLKPEDFAAYYCQQSFDDPFTFGQGTKLEIK

SEQ ID NO: 3130 - protein, 111 aa, Artificial Sequence
  source: /note="Description of Artificial Sequence: Synthetic polypeptide"
EIVLTQTPLSLSITPGEQASISCRASESVDSSGNSFMHWYLQKARPVPQLLIYRASNLESGVPDRFSGSGSRTDFTLKISRVEAEDFGVYYCQQSFDDPFTFGQGTKLEIK

SEQ ID NO: 3131 - protein, 111 aa, Artificial Sequence
  source: /note="Description of Artificial Sequence: Synthetic polypeptide"
EIVLTQTPLSLSITPGEQASMSCRASESVDSSGNSFMHWYLQKARPVPQLLIYRASNLESGVPDRFSGSGSRTDFTLKISRVEAEDFGVYYCQQSFDDPFTFGQGTKLEIK

SEQ ID NO: 3132 - protein, 111 aa, Artificial Sequence
  source: /note="Description of Artificial Sequence: Synthetic polypeptide"
EITLTQSPAFMSATPGDKVNISCRASESVDSSGNSFMHWYQQKPGEAPQFIIYRASNLESGIPPRFSGSGYRTDFTLTINNIESEDAAYYYCQQSFDDPFTFGQGTKLEIK

SEQ ID NO: 3133 - protein, 119 aa, Artificial Sequence
  source: /note="Description of Artificial Sequence: Synthetic polypeptide"
QVQLVQSGAEVKKPGASVKVSCKASGYAFSSSWMNWVRQAPGQGLEWIGRIYPGDGDTKYNGKFKGRATLTADKSTSTAYMELSSLRSEDTAVYYCARRGTGGWYFDVWGQGTTVTVSS

SEQ ID NO: 3134 - protein, 119 aa, Artificial Sequence
  source: /note="Description of Artificial Sequence: Synthetic polypeptide"
QVQLVQSGAEVKKPGSSVKVSCKASGYAFSSSWMNWVRQAPGQGLEWIGRIYPGDGDTKYNGKFKGRATLTADKSTSTAYMELSSLRSEDTAVYYCARRGTGGWYFDVWGQGTTVTVSS

SEQ ID NO: 3135 - protein, 119 aa, Artificial Sequence
  source: /note="Description of Artificial Sequence: Synthetic polypeptide"
QVQLVQSGAEVKKPGASVKVSCKASGYAFSSSWMNWVRQAPGKGLEWIGRIYPGDGDTKYNGKFKGRATLTADKSTSTAYMELSSLRSEDTAVYYCARRGTGGWYFDVWGQGTTVTVSS

SEQ ID NO: 3136 - protein, 119 aa, Artificial Sequence
  source: /note="Description of Artificial Sequence: Synthetic polypeptide"
QVQLVQSGAEVKKPGASVKVSCKASGYAFSSSWMNWVRQAPGQELEWIGRIYPGDGDTKYNGKFKGRATLTADKSISTAYMELSSLRSEDTATYYCARRGTGGWYFDVWGQGTTVTVSS

SEQ ID NO: 3137 - protein, 119 aa, Artificial Sequence
  source: /note="Description of Artificial Sequence: Synthetic polypeptide"
EVQLVQSGAEVKKPGATVKISCKASGYAFSSSWMNWVQQAPGKGLEWIGRIYPGDGDTKYNGKFKGRATLTADKSTSTAYMELSSLRSEDTAVYYCARRGTGGWYFDVWGQGTTVTVSS

SEQ ID NO: 3138 - protein, 119 aa, Artificial Sequence
  source: /note="Description of Artificial Sequence: Synthetic polypeptide"
QVQLVQSGAEVKKTGSSVKVSCKASGYAFSSSWMNWVRQAPGQALEWIGRIYPGDGDTKYNGKFKGRATLTADKSMSTAYMELSSLRSEDTAMYYCARRGTGGWYFDVWGQGTTVTVSS

SEQ ID NO: 3139 - protein, 119 aa, Artificial Sequence
  source: /note="Description of Artificial Sequence: Synthetic polypeptide"
QVQLVQSGAEVKKPGASVKVSCKASGYAFSSSWMNWVRQAPGQRLEWIGRIYPGDGDTKYNGKFKGRATLTADKSASTAYMELSSLRSEDMAVYYCARRGTGGWYFDVWGQGTTVTVSS

SEQ ID NO: 3140 - protein, 119 aa, Artificial Sequence
  source: /note="Description of Artificial Sequence: Synthetic polypeptide"
QVQLVQSGAEVKKPGASVKVSCKASGYAFSSSWMNWVRQAPGQGLEWIGRIYPGDGDTKYNGKFKGRATLTADKSTSTAYMELRSLRSDDMAVYYCARRGTGGWYFDVWGQGTTVTVSS

SEQ ID NO: 3141 - protein, 119 aa, Artificial Sequence
  source: /note="Description of Artificial Sequence: Synthetic polypeptide"
QVQLVQSGAEVKKPGASVKVSCKASGYAFSSSWMNWVRQAPGQRLEWIGRIYPGDGDTKYNGKFKGRATLTADKSASTAYMELSSLRSEDTAVYYCARRGTGGWYFDVWGQGTTVTVSS

SEQ ID NO: 3142 - protein, 119 aa, Artificial Sequence
  source: /note="Description of Artificial Sequence: Synthetic polypeptide"
QVQLVQSGAEVKKPGASVKVSCKASGYAFSSSWMNWVRQAPGQGLEWIGRIYPGDGDTKYNGKFKGRATLTADKSTSTAYMELRSLRSDDTAVYYCARRGTGGWYFDVWGQGTTVTVSS

SEQ ID NO: 3143 - protein, 119 aa, Artificial Sequence
  source: /note="Description of Artificial Sequence: Synthetic polypeptide"
QVQLVQSGAEVKKPGASVKVSCKASGYAFSSSWMNWVRQAPGQGLEWIGRIYPGDGDTKYNGKFKGRATLTADKSISTAYMELSRLRSDDTAVYYCARRGTGGWYFDVWGQGTTVTVSS

SEQ ID NO: 3144 - protein, 119 aa, Artificial Sequence
  source: /note="Description of Artificial Sequence: Synthetic polypeptide"
QVQLVQSGAEVKKPGASVKVSCKASGYAFSSSWMNWVRQAPGQGLEWIGRIYPGDGDTKYNGKFKGRATLTADKSISTAYMELSRLRSDDTVVYYCARRGTGGWYFDVWGQGTTVTVSS

SEQ ID NO: 3145 - protein, 119 aa, Artificial Sequence
  source: /note="Description of Artificial Sequence: Synthetic polypeptide"
QVQLVQSGAEVKKPGASVKVSCKASGYAFSSSWMNWVRQAPGQGLEWIGRIYPGDGDTKYNGKFKGWATLTADKSISTAYMELSRLRSDDTAVYYCARRGTGGWYFDVWGQGTTVTVSS

SEQ ID NO: 3146 - protein, 119 aa, Artificial Sequence
  source: /note="Description of Artificial Sequence: Synthetic polypeptide"
QVQLVQSGAEVKKPGASVKVSCKASGYAFSSSWMNWVRQATGQGLEWIGRIYPGDGDTKYNGKFKGRATLTANKSISTAYMELSSLRSEDTAVYYCARRGTGGWYFDVWGQGTTVTVSS

SEQ ID NO: 3147 - protein, 119 aa, Artificial Sequence
  source: /note="Description of Artificial Sequence: Synthetic polypeptide"
QVQLVQSGSELKKPGASVKVSCKASGYAFSSSWMNWVRQAPGQGLEWIGRIYPGDGDTKYNGKFKGRAVLSADKSVSTAYLQISSLKAEDTAVYYCARRGTGGWYFDVWGQGTTVTVSS

SEQ ID NO: 3148 - protein, 119 aa, Artificial Sequence
  source: /note="Description of Artificial Sequence: Synthetic polypeptide"
QVQLVQSGPEVKKPGTSVKVSCKASGYAFSSSWMNWVRQARGQRLEWIGRIYPGDGDTKYNGKFKGRATLTADKSTSTAYMELSSLRSEDTAVYYCARRGTGGWYFDVWGQGTTVTVSS

SEQ ID NO: 3149 - protein, 119 aa, Artificial Sequence
  source: /note="Description of Artificial Sequence: Synthetic polypeptide"
EVQLVQSGAEVKKPGESLKISCKASGYAFSSSWMNWVRQMPGKGLEWIGRIYPGDGDTKYNGKFKGQATLSADKSISTAYLQWSSLKASDTAMYYCARRGTGGWYFDVWGQGTTVTVSS

SEQ ID NO: 3150 - protein, 119 aa, Artificial Sequence
  source: /note="Description of Artificial Sequence: Synthetic polypeptide"
QVQLVQSGSELKKPGASVKVSCKASGYAFSSSWMNWVRQAPGQGLEWIGRIYPGDGDTKYNGKFKGRAVLSADKSVSMAYLQISSLKAEDTAVYYCARRGTGGWYFDVWGQGTTVTVSS

SEQ ID NO: 3151 - protein, 119 aa, Artificial Sequence
  source: /note="Description of Artificial Sequence: Synthetic polypeptide"
QVQLVQSGHEVKQPGASVKVSCKASGYAFSSSWMNWVPQAPGQGLEWIGRIYPGDGDTKYNGKFKGRAVLSADKSASTAYLQISSLKAEDMAMYYCARRGTGGWYFDVWGQGTTVTVSS

SEQ ID NO: 3152 - protein, 119 aa, Artificial Sequence
  source: /note="Description of Artificial Sequence: Synthetic polypeptide"
EVQLVQSGAEVKKPGESLKISCKASGYAFSSSWMNWVRQMPGKGLEWIGRIYPGDGDTKYNGKFKGQATLSADKPISTAYLQWSSLKASDTAMYYCARRGTGGWYFDVWGQGTTVTVSS

SEQ ID NO: 3153 - protein, 119 aa, Artificial Sequence
  source: /note="Description of Artificial Sequence: Synthetic polypeptide"
EVQLVQSGAEVKKPGESLRISCKASGYAFSSSWMNWVRQMPGKGLEWIGRIYPGDGDTKYNGKFKGQATLSADKSISTAYLQWSSLKASDTAMYYCARRGTGGWYFDVWGQGTTVTVSS

SEQ ID NO: 3154 - protein, 119 aa, Artificial Sequence
  source: /note="Description of Artificial Sequence: Synthetic polypeptide"
EVQLVQSGAEVKKPGESLRISCKASGYAFSSSWMNWVRQMPGKGLEWIGRIYPGDGDTKYNGKFKGHATLSADKSISTAYLQWSSLKASDTAMYYCARRGTGGWYFDVWGQGTTVTVSS

SEQ ID NO: 3155 - protein, 119 aa, Artificial Sequence
  source: /note="Description of Artificial Sequence: Synthetic polypeptide"
QVQLVQSGAEVKKTGSSVKVSCKASGYAFSSSWMNWVRQAPRQALEWIGRIYPGDGDTKYNGKFKGRATLTADKSMSTAYMELSSLRSEDTAMYYCARRGTGGWYFDVWGQGTTVTVSS

SEQ ID NO: 3156 - protein, 119 aa, Artificial Sequence
  source: /note="Description of Artificial Sequence: Synthetic polypeptide"
EVQLVESGGGLVQPGRSLRLSCTASGYAFSSSWMNWVRQAPGKGLEWIGRIYPGDGDTKYNGKFKGRATLSADKSKSIAYLQMNSLKTEDTAVYYCARRGTGGWYFDVWGQGTTVTVSS

SEQ ID NO: 3157 - protein, 119 aa, Artificial Sequence
  source: /note="Description of Artificial Sequence: Synthetic polypeptide"
EVQLVESGGGLVQPGPSLRLSCTASGYAFSSSWMNWVRQAPGKGLEWIGRIYPGDGDTKYNGKFKGRATLSADKSKSIAYLQMNSLKTEDTAVYYCARRGTGGWYFDVWGQGTTVTVSS

SEQ ID NO: 3158 - protein, 119 aa, Artificial Sequence
  source: /note="Description of Artificial Sequence: Synthetic polypeptide"
QVQLQESGPGLVKPSQTLSLTCTASGYAFSSSWMNWVRQPPGKGLEWIGRIYPGDGDTKYNGKFKGRATLSADKSKSQASLKLSSVTAADTAVYYCARRGTGGWYFDVWGQGTTVTVSS

SEQ ID NO: 3159 - protein, 119 aa, Artificial Sequence
  source: /note="Description of Artificial Sequence: Synthetic polypeptide"
QVQLQESGPGLVKPSGTLSLTCAASGYAFSSSWMNWVRQPPGKGLEWIGRIYPGDGDTKYNGKFKGRATLSADKSKSQASLKLSSVTAADTAVYYCARRGTGGWYFDVWGQGTTVTVSS

SEQ ID NO: 3160 - protein, 119 aa, Artificial Sequence
  source: /note="Description of Artificial Sequence: Synthetic polypeptide"
EVQLVESGGGLVKPGRSLRLSCTASGYAFSSSWMNWVRQAPGKGLEWIGRIYPGDGDTKYNGKFKGRATLSADKSKSIAYLQMNSLKTEDTAVYYCARRGTGGWYFDVWGQGTTVTVSS

SEQ ID NO: 3161 - protein, 119 aa, Artificial Sequence
  source: /note="Description of Artificial Sequence: Synthetic polypeptide"
EVQLVESGGGLVQPGGSLKLSCAASGYAFSSSWMNWVRQASGKGLEWIGRIYPGDGDTKYNGKFKGRATLSADKSKSTAYLQMNSLKTEDTAVYYCARRGTGGWYFDVWGQGTTVTVSS

SEQ ID NO: 3162 - protein, 119 aa, Artificial Sequence
  source: /note="Description of Artificial Sequence: Synthetic polypeptide"
QVQLQESGPGLVKPSQTLSLTCAASGYAFSSSWMNWVRQPPGKGLEWIGRIYPGDGDTKYNGKFKGRATLSADKSKSQASLKLSSVTAADTAVYYCARRGTGGWYFDVWGQGTTVTVSS

SEQ ID NO: 3163 - protein, 119 aa, Artificial Sequence
  source: /note="Description of Artificial Sequence: Synthetic polypeptide"
EVQLVESGGGLVKPGGSLRLSCAASGYAFSSSWMNWVRQAPGKGLEWIGRIYPGDGDTKYNGKFKGRATLSADKSKSTAYLQMNSLKTEDTAVYYCARRGTGGWYFDVWGQGTTVTVSS

SEQ ID NO: 3164 - protein, 119 aa, Artificial Sequence
  source: /note="Description of Artificial Sequence: Synthetic polypeptide"
EVQLVESGGALVKPGGSLRLSCAASGYAFSSSWMNWVRQAPGKGLEWIGRIYPGDGDTKYNGKFKGRATLSADKSKSTAYLQMNSLKTEDTAVYYCARRGTGGWYFDVWGQGTTVTVSS

SEQ ID NO: 3165 - protein, 119 aa, Artificial Sequence
  source: /note="Description of Artificial Sequence: Synthetic polypeptide"
QVQLQESGPGLVKPSQTLSLTCAAYGYAFSSSWMNWVRQPPGKGLEWIGRIYPGDGDTKYNGKFKGRATLSADKSKSQASLKLSSVTAADTAVYYCARRGTGGWYFDVWGQGTTVTVSS

SEQ ID NO: 3166 - protein, 119 aa, Artificial Sequence
  source: /note="Description of Artificial Sequence: Synthetic polypeptide"
QVQLQESGSGLVKPSQTLSLTCAASGYAFSSSWMNWVRQPPGKGLEWIGRIYPGDGDTKYNGKFKGRATLSADKSKSQASLKLSSVTAADTAVYYCARRGTGGWYFDVWGQGTTVTVSS

SEQ ID NO: 3167 - protein, 119 aa, Artificial Sequence
  source: /note="Description of Artificial Sequence: Synthetic polypeptide"
EVQLVESGGGLVQPGGSLRLSCAASGYAFSSSWMNWVRQAPGKGLEWIGRIYPGDGDTKYNGKFKGRATLSADKSKSSAYLQMNSLKTEDTAVYYCARRGTGGWYFDVWGQGTTVTVSS

SEQ ID NO: 3168 - protein, 119 aa, Artificial Sequence
  source: /note="Description of Artificial Sequence: Synthetic polypeptide"
QVQLQESGPGLVKPSDTLSLTCTASGYAFSSSWMNWVRQPPGKGLEWIGRIYPGDGDTKYNGKFKGRATLSADKSKSQASLKLSSVTAADTAVYYCARRGTGGWYFDVWGQGTTVTVSS

SEQ ID NO: 3169 - protein, 119 aa, Artificial Sequence
  source: /note="Description of Artificial Sequence: Synthetic polypeptide"
QVQLQESGPGLVKPSQTLSLTCTASGYAFSSSWMNWVRQHPGKGLEWIGRIYPGDGDTKYNGKFKGRATLSADKSKSQASLKLSSVTAADTAVYYCARRGTGGWYFDVWGQGTTVTVSS

SEQ ID NO: 3170 - protein, 119 aa, Artificial Sequence
  source: /note="Description of Artificial Sequence: Synthetic polypeptide"
QVQLQESGPGLVKPSQTLSLTCTASGYAFSSSWMNWVRQHPGKGLEWIGRIYPGDGDTKYNGKFKGLATLSADKSKSQASLKLSSVTAADTAVYYCARRGTGGWYFDVWGQGTTVTVSS

SEQ ID NO: 3171 - protein, 119 aa, Artificial Sequence
  source: /note="Description of Artificial Sequence: Synthetic polypeptide"
QVQLVESGGGVVQPGRSLRLSCAASGYAFSSSWMNWVRQAPGKGLEWIGRIYPGDGDTKYNGKFKGRATLSADKSKSTAYLQMSSLRAEDTAVYYCARRGTGGWYFDVWGQGTTVTVSS

SEQ ID NO: 3172 - protein, 119 aa, Artificial Sequence
  source: /note="Description of Artificial Sequence: Synthetic polypeptide"
QVQLVESGGGLVKPGGSLRLSCAASGYAFSSSWMNWVRQAPGKGLEWIGRIYPGDGDTKYNGKFKGRATLSADKAKSSAYLQMNSLRAEDTAVYYCARRGTGGWYFDVWGQGTTVTVSS

SEQ ID NO: 3173 - protein, 119 aa, Artificial Sequence
  source: /note="Description of Artificial Sequence: Synthetic polypeptide"
QVQLVESGGGLVQPGGSLRLSCSASGYAFSSSWMNWVRQAPGKGLEWIGRIYPGDGDTKYNGKFKGRATLSADKSKSTAYLQMNSLRAEDTAVYYCARRGTGGWYFDVWGQGTTVTVSS

SEQ ID NO: 3174 - protein, 119 aa, Artificial Sequence
  source: /note="Description of Artificial Sequence: Synthetic polypeptide"
QVQLLESGGGLVKPGGSLRLSCAASGYAFSSSWMNWVRQAPGKGLEWIGRIYPGDGDTKYNGKFKGRATLSADKAKSSAYLQMNSLRAEDTAVYYCARRGTGGWYFDVWGQGTTVTVSS

SEQ ID NO: 3175 - protein, 119 aa, Artificial Sequence
  source: /note="Description of Artificial Sequence: Synthetic polypeptide"
EVQLVESGGGLVQPGGSLRLSCSASGYAFSSSWMNWVRQAPGKGLEWIGRIYPGDGDTKYNGKFKGRATLSADKSKSTAYLQMSSLRAEDTAVYYCARRGTGGWYFDVWGQGTTVTVSS

SEQ ID NO: 3176 - protein, 119 aa, Artificial Sequence
  source: /note="Description of Artificial Sequence: Synthetic polypeptide"
QVQLQESGPGLVKPSDTLSLTCAASGYAFSSSWMNWVRQPPGKGLEWIGRIYPGDGDTKYNGKFKGRATLSADKSKSQASLKLSSVTAVDTAVYYCARRGTGGWYFDVWGQGTTVTVSS

SEQ ID NO: 3177 - protein, 119 aa, Artificial Sequence
  source: /note="Description of Artificial Sequence: Synthetic polypeptide"
QVQLQESGPGLVKPSQTLSLTCAASGYAFSSSWMNWVRQPPGKGLEWIGRIYPGDGDTKYNGKFKGRATLSADKSKSQASLKLSSVTAVDTAVYYCARRGTGGWYFDVWGQGTTVTVSS

SEQ ID NO: 3178 - protein, 119 aa, Artificial Sequence
  source: /note="Description of Artificial Sequence: Synthetic polypeptide"
EVQLVESGGGLVQPGGSLRLSCSASGYAFSSSWMNWVRQAPGKGLEWIGRIYPGDGDTKYNGKFKGRATLSADKSKSTAYVQMSSLRAEDTAVYYCARRGTGGWYFDVWGQGTTVTVSS

SEQ ID NO: 3179 - protein, 119 aa, Artificial Sequence
  source: /note="Description of Artificial Sequence: Synthetic polypeptide"
QVQLVDSGGGVVQPGRSLRLSCAASGYAFSSSWMNWVRQAPGKGLEWIGRIYPGDGDTKYNGKFKGRATLSADKSKSTAYLQMNSLRAEDTAVYYCARRGTGGWYFDVWGQGTTVTVSS

SEQ ID NO: 3180 - protein, 119 aa, Artificial Sequence
  source: /note="Description of Artificial Sequence: Synthetic polypeptide"
QVQLVESGGGVVQPGRSLRLSCAASGYAFSSSWMNWVRQAPGKGLEWIGRIYPGDGDTKYNGKFKGRATLSADKSKSTAYLQMNSLRAEGTAVYYCARRGTGGWYFDVWGQGTTVTVSS

SEQ ID NO: 3181 - protein, 119 aa, Artificial Sequence
  source: /note="Description of Artificial Sequence: Synthetic polypeptide"
QVQLVESGGGVVQPGRSLRLSCAASGYAFSSSWMNWVRQAPGKGLEWIGRIYPGDGDTKYNGKFKGRATLSADKSKSTAYLQMNSLRAEDTAVYYCARRGTGGWYFDVWGQGTTVTVSS

SEQ ID NO: 3182 - protein, 119 aa, Artificial Sequence
  source: /note="Description of Artificial Sequence: Synthetic polypeptide"
EVQLVESGGGLVQPGGSLRLSCAASGYAFSSSWMNWVRQAPGKGLEWIGRIYPGDGDTKYNGKFKGRATLSADKSKSTAYLQMNSLRAEDTAVYYCARRGTGGWYFDVWGQGTTVTVSS

SEQ ID NO: 3183 - protein, 117 aa, Artificial Sequence
  source: /note="Description of Artificial Sequence: Synthetic polypeptide"
EVQLVESGGDLVKPGGSLKLSCAVSGFTFRSYGMSWVRQTPDKRLEWVALISSGGSYTYYTDSVKGRFTISRDNAKNTLYLQMSSLKSEDTAIYYCSRHGGNFFDYWGQGTTLTVSS

SEQ ID NO: 3184 - protein, 107 aa, Artificial Sequence
  source: /note="Description of Artificial Sequence: Synthetic polypeptide"
QIVLTQSPSIMSASPGEKVTMTCSVSSSVSYMHWYQQKSGTSPKRWIYDTSKLASGVPARFSGSGSGTSYSLTISSMEAEDAATYYCQQWSSNPQYTFGGGTKLEIK

SEQ ID NO: 3185 - protein, 107 aa, Artificial Sequence
  source: /note="Description of Artificial Sequence: Synthetic polypeptide"
DIVLTQSPAFLSVTPGEKVTITCSVSSSVSYMHWYQQKPDQAPKLLIYDTSKLASGVPSRFSGSGSGTDYTFTISSLEAEDAATYYCQQWSSNPQYTFGQGTKLEIK

SEQ ID NO: 3186 - protein, 107 aa, Artificial Sequence
  source: /note="Description of Artificial Sequence: Synthetic polypeptide"
AIQLTQSPSSLSASVGDRVTITCSVSSSVSYMHWYQQKPGKAPKLLIYDTSKLASGVPSRFSGSGSGTDYTLTISSLQPEDFATYYCQQWSSNPQYTFGQGTKLEIK

SEQ ID NO: 3187 - protein, 107 aa, Artificial Sequence
  source: /note="Description of Artificial Sequence: Synthetic polypeptide"
DIQLTQSPSFLSASVGDRVTITCSVSSSVSYMHWYQQKPGKAPKLLIYDTSKLASGVPSRFSGSGSGTEYTLTISSLQPEDFATYYCQQWSSNPQYTFGQGTKLEIK

SEQ ID NO: 3188 - protein, 107 aa, Artificial Sequence
  source: /note="Description of Artificial Sequence: Synthetic polypeptide"
DIQLTQSPSSLSASVGDRVTITCSVSSSVSYMHWYQQKPGKAPKLLIYDTSKLASGVPSRFSGSGSGTDYTLTISSLQPEDFATYYCQQWSSNPQYTFGQGTKLEIK

SEQ ID NO: 3189 - protein, 107 aa, Artificial Sequence
  source: /note="Description of Artificial Sequence: Synthetic polypeptide"
DIQLTQSPSSVSASVGDRVTITCSVSSSVSYMHWYQQKPGKAPKLLIYDTSKLASGVPSRFSGSGSGTDYTLTISSLQPEDFATYYCQQWSSNPQYTFGQGTKLEIK

SEQ ID NO: 3190 - protein, 107 aa, Artificial Sequence
  source: /note="Description of Artificial Sequence: Synthetic polypeptide"
DIQLTQSPSSLSASVGDRVTITCSVSSSVSYMHWYQQKPGKVPKLLIYDTSKLASGVPSRFSGSGSGTDYTLTISSLQPEDVATYYCQQWSSNPQYTFGQGTKLEIK

SEQ ID NO: 3191 - protein, 107 aa, Artificial Sequence
  source: /note="Description of Artificial Sequence: Synthetic polypeptide"
DIQLTQSPSSLSASVGDRVTITCSVSSSVSYMHWYQQKPGQAPKLLIYDTSKLASGVPSRFSGSGSGTDYTLTISSLQPEDVATYYCQQWSSNPQYTFGQGTKLEIK

SEQ ID NO: 3192 - protein, 107 aa, Artificial Sequence
  source: /note="Description of Artificial Sequence: Synthetic polypeptide"
EIVLTQSPDFQSVTPKEKVTITCSVSSSVSYMHWYQQKPDQSPKLLIYDTSKLASGVPSRFSGSGSGTDYTLTINSLEAEDAATYYCQQWSSNPQYTFGQGTKLEIK

SEQ ID NO: 3193 - protein, 107 aa, Artificial Sequence
  source: /note="Description of Artificial Sequence: Synthetic polypeptide"
AIRLTQSPFSLSASVGDRVTITCSVSSSVSYMHWYQQKPAKAPKLFIYDTSKLASGVPSRFSGSGSGTDYTLTISSLQPEDFATYYCQQWSSNPQYTFGQGTKLEIK

SEQ ID NO: 3194 - protein, 107 aa, Artificial Sequence
  source: /note="Description of Artificial Sequence: Synthetic polypeptide"
DIQLTQSPSSLSASVGDRVTITCSVSSSVSYMHWYQQKPGKAPKLLIYDTSKLASGVPSRFSGSGSGTDYTFTISSLQPEDIATYYCQQWSSNPQYTFGQGTKLEIK

SEQ ID NO: 3195 - protein, 107 aa, Artificial Sequence
  source: /note="Description of Artificial Sequence: Synthetic polypeptide"
EIVLTQSPATLSLSPGERATLSCSVSSSVSYMHWYQQKPGQAPKLLIYDTSKLASGIPARFSGSGSGTDYTLTISSLEPEDFAVYYCQQWSSNPQYTFGQGTKLEIK

SEQ ID NO: 3196 - protein, 107 aa, Artificial Sequence
  source: /note="Description of Artificial Sequence: Synthetic polypeptide"
DIQLTQSPSTLSASVGDRVTITCSVSSSVSYMHWYQQKPGKAPKLLIYDTSKLASGVPSRFSGSGSGTEYTLTISSLQPDDFATYYCQQWSSNPQYTFGQGTKLEIK

SEQ ID NO: 3197 - protein, 107 aa, Artificial Sequence
  source: /note="Description of Artificial Sequence: Synthetic polypeptide"
DIQLTQSPSSLSASVGDRVTITCSVSSSVSYMHWYQQKPGKTPKLLIYDTSKLASGIPSRFSGSGSGTDYTLTIRSLQPEDFATYYCQQWSSNPQYTFGQGTKLEIK

SEQ ID NO: 3198 - protein, 107 aa, Artificial Sequence
  source: /note="Description of Artificial Sequence: Synthetic polypeptide"
EIVLTQSPPTLSLSPGERVTLSCSVSSSVSYMHWYQQKPGQAPKLLIYDTSKLASGIPARFSGSGSGTDYTLTISSLQPEDFAVYYCQQWSSNPQYTFGQGTKLEIK

SEQ ID NO: 3199 - protein, 107 aa, Artificial Sequence
  source: /note="Description of Artificial Sequence: Synthetic polypeptide"
DIQLTQSPSSLSASVGDRVTITCSVSSSVSYMHWYQQKPGKAPKRLIYDTSKLASGVPSRFSGSGSGTEYTLTISSLQPEDFATYYCQQWSSNPQYTFGQGTKLEIK

SEQ ID NO: 3200 - protein, 107 aa, Artificial Sequence
  source: /note="Description of Artificial Sequence: Synthetic polypeptide"
EIVLTQSPATLSLSPGERATLSCSVSSSVSYMHWYQQKPGQAPKLLIYDTSKLASGIPARFSGSGPGTDYTLTISSLEPEDFAVYYCQQWSSNPQYTFGQGTKLEIK

SEQ ID NO: 3201 - protein, 107 aa, Artificial Sequence
  source: /note="Description of Artificial Sequence: Synthetic polypeptide"
EIVLTQSPATLSLSPGERATLSCSVSSSVSYMHWYQQKPGQAPKLLIYDTSKLASGIPARFSGSGSGTDYTLTISRLEPEDFAVYYCQQWSSNPQYTFGQGTKLEIK

SEQ ID NO: 3202 - protein, 107 aa, Artificial Sequence
  source: /note="Description of Artificial Sequence: Synthetic polypeptide"
EIVLTQSPATLSLSPGERATLSCSVSSSVSYMHWYQQKPGQAPKLLIYDTSKLASGIPARFSGSGSGTDYTLTISSLQPEDFAVYYCQQWSSNPQYTFGQGTKLEIK

SEQ ID NO: 3203 - protein, 107 aa, Artificial Sequence
  source: /note="Description of Artificial Sequence: Synthetic polypeptide"
EIVLTQSPATLSVSPGERATLSCSVSSSVSYMHWYQQKPGQAPKLLIYDTSKLASGIPARFSGSGSGTEYTLTISSLQSEDFAVYYCQQWSSNPQYTFGQGTKLEIK

SEQ ID NO: 3204 - protein, 107 aa, Artificial Sequence
  source: /note="Description of Artificial Sequence: Synthetic polypeptide"
EIVLTQSPATLSVSPGERATLSCSVSSSVSYMHWYQQKPGQAPKLLIYDTSKLASGIPARFSGSGSGTEYTLTISILQSEDFAVYYCQQWSSNPQYTFGQGTKLEIK

SEQ ID NO: 3205 - protein, 107 aa, Artificial Sequence
  source: /note="Description of Artificial Sequence: Synthetic polypeptide"
EIVLTQSPPTLSLSPGERVTLSCSVSSSVSYMHWYQQKPGQAPKLLIYDTSKLASSIPARFSGSGSGTDYTLTISSLQPEDFAVYYCQQWSSNPQYTFGQGTKLEIK

SEQ ID NO: 3206 - protein, 107 aa, Artificial Sequence
  source: /note="Description of Artificial Sequence: Synthetic polypeptide"
DIQLTQSPSSLSASVGDRVTITCSVSSSVSYMHWYQQKPGKAPKSLIYDTSKLASGVPSRFSGSGSGTDYTLTISSLQPEDFATYYCQQWSSNPQYTFGQGTKLEIK

SEQ ID NO: 3207 - protein, 107 aa, Artificial Sequence
  source: /note="Description of Artificial Sequence: Synthetic polypeptide"
DIQLTQSPSSLSASVGDRVTITCSVSSSVSYMHWYQQKPGKAPKRLIYDTSKLASGVPSRFSGSGSGTEYTLTISNLQPEDFATYYCQQWSSNPQYTFGQGTKLEIK

SEQ ID NO: 3208 - protein, 107 aa, Artificial Sequence
  source: /note="Description of Artificial Sequence: Synthetic polypeptide"
DIQLTQSPSAMSASVGDRVTITCSVSSSVSYMHWYQQKPGKVPKRLIYDTSKLASGVPSRFSGSGSGTEYTLTISSLQPEDFATYYCQQWSSNPQYTFGQGTKLEIK

SEQ ID NO: 3209 - protein, 107 aa, Artificial Sequence
  source: /note="Description of Artificial Sequence: Synthetic polypeptide"
EIVLTQSPATLSLSPGERATLSCSVSSSVSYMHWYQQKPGQAPKLLIYDTSKLASGIPDRFSGSGSGTDYTLTISRLEPEDFAVYYCQQWSSNPQYTFGQGTKLEIK

SEQ ID NO: 3210 - protein, 107 aa, Artificial Sequence
  source: /note="Description of Artificial Sequence: Synthetic polypeptide"
EIVLTQSPATLSLSPGERATLSCSVSSSVSYMHWYQQKPGLAPKLLIYDTSKLASGIPDRFSGSGSGTDYTLTISRLEPEDFAVYYCQQWSSNPQYTFGQGTKLEIK

SEQ ID NO: 3211 - protein, 107 aa, Artificial Sequence
  source: /note="Description of Artificial Sequence: Synthetic polypeptide"
EIVLTQSPGTLSLSPGERATLSCSVSSSVSYMHWYQQKPGQAPKLLIYDTSKLASGIPDRFSGSGSGTDYTLTISRLEPEDFAVYYCQQWSSNPQYTFGQGTKLEIK

SEQ ID NO: 3212 - protein, 107 aa, Artificial Sequence
  source: /note="Description of Artificial Sequence: Synthetic polypeptide"
DIQLTQSPSSLSASVGDRVTITCSVSSSVSYMHWYQQKPGKAPKSLIYDTSKLASGVPSKFSGSGSGTDYTLTISSLQPEDFATYYCQQWSSNPQYTFGQGTKLEIK

SEQ ID NO: 3213 - protein, 107 aa, Artificial Sequence
  source: /note="Description of Artificial Sequence: Synthetic polypeptide"
DIQLTQSPSSLSASVGDRVTITCSVSSSVSYMHWYQQKPEKAPKSLIYDTSKLASGVPSRFSGSGSGTDYTLTISSLQPEDFATYYCQQWSSNPQYTFGQGTKLEIK

SEQ ID NO: 3214 - protein, 107 aa, Artificial Sequence
  source: /note="Description of Artificial Sequence: Synthetic polypeptide"
DIVLTQSPDSLAVSLGERATINCSVSSSVSYMHWYQQKPGQPPKLLIYDTSKLASGVPDRFSGSGSGTDYTLTISSLQAEDVAVYYCQQWSSNPQYTFGQGTKLEIK

SEQ ID NO: 3215 - protein, 107 aa, Artificial Sequence
  source: /note="Description of Artificial Sequence: Synthetic polypeptide"
EIVLTQTPLSLSITPGEQASMSCSVSSSVSYMHWYLQKARPVPKLLIYDTSKLASGVPDRFSGSGSGTDYTLKISRVEAEDFGVYYCQQWSSNPQYTFGQGTKLEIK

SEQ ID NO: 3216 - protein, 107 aa, Artificial Sequence
  source: /note="Description of Artificial Sequence: Synthetic polypeptide"
EIVLTQTPLSLSITPGEQASISCSVSSSVSYMHWYLQKARPVPKLLIYDTSKLASGVPDRFSGSGSGTDYTLKISRVEAEDFGVYYCQQWSSNPQYTFGQGTKLEIK

SEQ ID NO: 3217 - protein, 107 aa, Artificial Sequence
  source: /note="Description of Artificial Sequence: Synthetic polypeptide"
DIVLTQSPLSLPVTPGEPASISCSVSSSVSYMHWYLQKPGQSPKLLIYDTSKLASGVPDRFSGSGSGTDYTLKISRVEAEDVGVYYCQQWSSNPQYTFGQGTKLEIK

SEQ ID NO: 3218 - protein, 107 aa, Artificial Sequence
  source: /note="Description of Artificial Sequence: Synthetic polypeptide"
DIVLTQSPLSLPVTLGQPASISCSVSSSVSYMHWYQQRPGQSPKRLIYDTSKLASGVPDRFSGSGSGTDYTLKISRVEAEDVGVYYCQQWSSNPQYTFGQGTKLEIK

SEQ ID NO: 3219 - protein, 107 aa, Artificial Sequence
  source: /note="Description of Artificial Sequence: Synthetic polypeptide"
DIVLTQTPLSLPVTPGEPASISCSVSSSVSYMHWYLQKPGQSPKLLIYDTSKLASGVPDRFSGSGSGTDYTLKISRVEAEDVGVYYCQQWSSNPQYTFGQGTKLEIK

SEQ ID NO: 3220 - protein, 107 aa, Artificial Sequence
  source: /note="Description of Artificial Sequence: Synthetic polypeptide"
DIVLTQTPLSLSVTPGQPASISCSVSSSVSYMHWYLQKPGQSPKLLIYDTSKLASGVPDRFSGSGSGTDYTLKISRVEAEDVGVYYCQQWSSNPQYTFGQGTKLEIK

SEQ ID NO: 3221 - protein, 107 aa, Artificial Sequence
  source: /note="Description of Artificial Sequence: Synthetic polypeptide"
DIVLTQTPLSLSVTPGQPASISCSVSSSVSYMHWYLQKPGQPPKLLIYDTSKLASGVPDRFSGSGSGTDYTLKISRVEAEDVGVYYCQQWSSNPQYTFGQGTKLEIK

SEQ ID NO: 3222 - protein, 107 aa, Artificial Sequence
  source: /note="Description of Artificial Sequence: Synthetic polypeptide"
DIQLIQSPSFLSASVGDRVSIICSVSSSVSYMHWYLQKPGKSPKLFIYDTSKLASGVSSRFSGRGSGTDYTLTIISLKPEDFAAYYCQQWSSNPQYTFGQGTKLEIK

SEQ ID NO: 3223 - protein, 107 aa, Artificial Sequence
  source: /note="Description of Artificial Sequence: Synthetic polypeptide"
DIVLTQTPLSSPVTLGQPASISCSVSSSVSYMHWYQQRPGQPPKLLIYDTSKLASGVPDRFSGSGAGTDYTLKISRVEAEDVGVYYCQQWSSNPQYTFGQGTKLEIK

SEQ ID NO: 3224 - protein, 107 aa, Artificial Sequence
  source: /note="Description of Artificial Sequence: Synthetic polypeptide"
EITLTQSPAFMSATPGDKVNISCSVSSSVSYMHWYQQKPGEAPKFIIYDTSKLASGIPPRFSGSGYGTDYTLTINNIESEDAAYYYCQQWSSNPQYTFGQGTKLEIK

SEQ ID NO: 3225 - protein, 117 aa, Artificial Sequence
  source: /note="Description of Artificial Sequence: Synthetic polypeptide"
EVQLVESGGGLVKPGGSLRLSCAVSGFTFRSYGMSWVRQAPGKGLEWVALISSGGSYTYYTDSVKGRFTISRDNSKNTLYLQMNSLKTEDTAVYYCSRHGGNFFDYWGQGTTVTVSS

SEQ ID NO: 3226 - protein, 117 aa, Artificial Sequence
  source: /note="Description of Artificial Sequence: Synthetic polypeptide"
EVQLVESGGALVKPGGSLRLSCAVSGFTFRSYGMSWVRQAPGKGLEWVALISSGGSYTYYTDSVKGRFTISRDNSKNTLYLQMNSLKTEDTAVYYCSRHGGNFFDYWGQGTTVTVSS

SEQ ID NO: 3227 - protein, 117 aa, Artificial Sequence
  source: /note="Description of Artificial Sequence: Synthetic polypeptide"
EVQLVESGGGLVQPGGSLRLSCAVSGFTFRSYGMSWVRQAPGKGLEWVALISSGGSYTYYTDSVKGRFTISRDNAKNTLYLQMNSLRAEDTAVYYCSRHGGNFFDYWGQGTTVTVSS

SEQ ID NO: 3228 - protein, 117 aa, Artificial Sequence
  source: /note="Description of Artificial Sequence: Synthetic polypeptide"
EVQLVESGGGLVQPGGSLRLSCAVSGFTFRSYGMSWVRQAPGKGLEWVALISSGGSYTYYTDSVKGRFTISRDNAKNSLYLQMNSLRAEDTAVYYCSRHGGNFFDYWGQGTTVTVSS

SEQ ID NO: 3229 - protein, 117 aa, Artificial Sequence
  source: /note="Description of Artificial Sequence: Synthetic polypeptide"
EVQLVESGGGLVQPGGSLRLSCAVSGFTFRSYGMSWVRQAPGKGLEWVALISSGGSYTYYTDSVKGRFTISRDNSKNSLYLQMNSLKTEDTAVYYCSRHGGNFFDYWGQGTTVTVSS

SEQ ID NO: 3230 - protein, 117 aa, Artificial Sequence
  source: /note="Description of Artificial Sequence: Synthetic polypeptide"
EVQLVESGGGLVQPGGSLRLSCAVSGFTFRSYGMSWVRQAPGKGLEWVALISSGGSYTYYTDSVKGRFTISRDNAKNSLYLQMNSLRAEDMAVYYCSRHGGNFFDYWGQGTTVTVSS

SEQ ID NO: 3231 - protein, 117 aa, Artificial Sequence
  source: /note="Description of Artificial Sequence: Synthetic polypeptide"
EVQLVESGGGLVQPGGSLRLSCAVSGFTFRSYGMSWVRQAPGKGLEWVALISSGGSYTYYTDSVKGQFTISRDNAKNTLYLQMNSLRAEDMAVYYCSRHGGNFFDYWGQGTTVTVSS

SEQ ID NO: 3232 - protein, 117 aa, Artificial Sequence
  source: /note="Description of Artificial Sequence: Synthetic polypeptide"
EVQLVESGGGLVKPGRSLRLSCTVSGFTFRSYGMSWVRQAPGKGLEWVALISSGGSYTYYTDSVKGRFTISRDNSKNILYLQMNSLKTEDTAVYYCSRHGGNFFDYWGQGTTVTVSS

SEQ ID NO: 3233 - protein, 117 aa, Artificial Sequence
  source: /note="Description of Artificial Sequence: Synthetic polypeptide"
EVQLVESGGGLVKPGGSLRLSCAVSGFTFRSYGMSWVRQAPGKGLEWVALISSGGSYTYYTDSVKGRFTISRDNAKNSLYLQMNSLRAEDTAVYYCSRHGGNFFDYWGQGTTVTVSS

SEQ ID NO: 3234 - protein, 117 aa, Artificial Sequence
  source: /note="Description of Artificial Sequence: Synthetic polypeptide"
EVQLVESGGGLVQPGGSLKLSCAVSGFTFRSYGMSWVRQASGKGLEWVALISSGGSYTYYTDSVKGRFTISRDNSKNTLYLQMNSLKTEDTAVYYCSRHGGNFFDYWGQGTTVTVSS

SEQ ID NO: 3235 - protein, 117 aa, Artificial Sequence
  source: /note="Description of Artificial Sequence: Synthetic polypeptide"
QVQLVESGGGVVQPGGSLRLSCAVSGFTFRSYGMSWVRQAPGKGLEWVALISSGGSYTYYTDSVKGRFTISRDNSKNTLYLQMNSLRAEDTAVYYCSRHGGNFFDYWGQGTTVTVSS

SEQ ID NO: 3236 - protein, 117 aa, Artificial Sequence
  source: /note="Description of Artificial Sequence: Synthetic polypeptide"
QVQLVESGGGVVQPGRSLRLSCAVSGFTFRSYGMSWVRQAPGKGLEWVALISSGGSYTYYTDSVKGRFTISRDNSKNTLYLQMSSLRAEDTAVYYCSRHGGNFFDYWGQGTTVTVSS

SEQ ID NO: 3237 - protein, 117 aa, Artificial Sequence
  source: /note="Description of Artificial Sequence: Synthetic polypeptide"
EVQLVESGGGLVQPGGSLRLSCPVSGFTFRSYGMSWVRQAPGKGLEWVALISSGGSYTYYTDSVKGRFTISRDNANNSLYLQMNSLRAEDTAVYYCSRHGGNFFDYWGQGTTVTVSS

SEQ ID NO: 3238 - protein, 117 aa, Artificial Sequence
  source: /note="Description of Artificial Sequence: Synthetic polypeptide"
EVQLVESGGGLVQPGRSLRLSCTVSGFTFRSYGMSWVRQAPGKGLEWVALISSGGSYTYYTDSVKGRFTISRDNSKNILYLQMNSLKTEDTAVYYCSRHGGNFFDYWGQGTTVTVSS

SEQ ID NO: 3239 - protein, 117 aa, Artificial Sequence
  source: /note="Description of Artificial Sequence: Synthetic polypeptide"
EVQLVESGGGLVQPGPSLRLSCTVSGFTFRSYGMSWVRQAPGKGLEWVALISSGGSYTYYTDSVKGRFTISRDNSKNILYLQMNSLKTEDTAVYYCSRHGGNFFDYWGQGTTVTVSS

SEQ ID NO: 3240 - protein, 117 aa, Artificial Sequence
  source: /note="Description of Artificial Sequence: Synthetic polypeptide"
EVQLVESGGGLVQPGGSLRLSCAVSGFTFRSYGMSWVRQAPGKGLEWVALISSGGSYTYYTDSVKGRFTISRDNSKNTLYLQMNSLRAEDTAVYYCSRHGGNFFDYWGQGTTVTVSS

SEQ ID NO: 3241 - protein, 117 aa, Artificial Sequence
  source: /note="Description of Artificial Sequence: Synthetic polypeptide"
EVQLVESGGGLVQPGGSLRLSCAVSGFTFRSYGMSWVRQAPGKGLEWVALISSGGSYTYYTDSVKGRFTISRDNAKNSLYLQMNSLRDEDTAVYYCSRHGGNFFDYWGQGTTVTVSS

SEQ ID NO: 3242 - protein, 117 aa, Artificial Sequence
  source: /note="Description of Artificial Sequence: Synthetic polypeptide"
QVQLVESGGGLVKPGGSLRLSCAVSGFTFRSYGMSWVRQAPGKGLEWVALISSGGSYTYYTDSVKGRFTISRDNAKNSLYLQMNSLRAEDTAVYYCSRHGGNFFDYWGQGTTVTVSS

SEQ ID NO: 3243 - protein, 117 aa, Artificial Sequence
  source: /note="Description of Artificial Sequence: Synthetic polypeptide"
QVQLVESGGGVVQPGRSLRLSCAVSGFTFRSYGMSWVRQAPGKGLEWVALISSGGSYTYYTDSVKGRFTISRDNSKNTLYLQMNSLRAEDTAVYYCSRHGGNFFDYWGQGTTVTVSS

SEQ ID NO: 3244 - protein, 117 aa, Artificial Sequence
  source: /note="Description of Artificial Sequence: Synthetic polypeptide"
EVQLLESGGGLVQPGGSLRLSCAVSGFTFRSYGMSWVRQAPGKGLEWVALISSGGSYTYYTDSVKGRFTISRDNSKNTLYLQMNSLRAEDTAVYYCSRHGGNFFDYWGQGTTVTVSS

SEQ ID NO: 3245 - protein, 117 aa, Artificial Sequence
  source: /note="Description of Artificial Sequence: Synthetic polypeptide"
EVQLVESGGGLVQPGGSLRLSCAVSGFTFRSYGMSWVRQAPGKGLEWVALISSGGSYTYYTDSVKGRFTISRHNSKNTLYLQMNSLRAEDTAVYYCSRHGGNFFDYWGQGTTVTVSS

SEQ ID NO: 3246 - protein, 117 aa, Artificial Sequence
  source: /note="Description of Artificial Sequence: Synthetic polypeptide"
EVQLVESGGGLIQPGGSLRLSCAVSGFTFRSYGMSWVRQPPGKGLEWVALISSGGSYTYYTDSVKGRFTISRDNSKNTLYLQMNSLRAEDTAVYYCSRHGGNFFDYWGQGTTVTVSS

SEQ ID NO: 3247 - protein, 117 aa, Artificial Sequence
  source: /note="Description of Artificial Sequence: Synthetic polypeptide"
EVQLVESGGGLIQPGGSLRLSCAVSGFTFRSYGMSWVRQAPGKGLEWVALISSGGSYTYYTDSVKGRFTISRDNSKNTLYLQMNSLRAEDTAVYYCSRHGGNFFDYWGQGTTVTVSS

SEQ ID NO: 3248 - protein, 117 aa, Artificial Sequence
  source: /note="Description of Artificial Sequence: Synthetic polypeptide"
EVQLVESGGGLVQPGRSLRLSCAVSGFTFRSYGMSWVRQAPGKGLEWVALISSGGSYTYYTDSVKGRFTISRDNAKNSLYLQMNSLRAEDTALYYCSRHGGNFFDYWGQGTTVTVSS

SEQ ID NO: 3249 - protein, 117 aa, Artificial Sequence
  source: /note="Description of Artificial Sequence: Synthetic polypeptide"
QVQLVESGGGVVQPGRSLRLSCAVSGFTFRSYGMSWVRQAPGKGLEWVALISSGGSYTYYTDSVKGRFTISRDNSKNRLYLQMNSLRAEDTAVYYCSRHGGNFFDYWGQGTTVTVSS

SEQ ID NO: 3250 - protein, 117 aa, Artificial Sequence
  source: /note="Description of Artificial Sequence: Synthetic polypeptide"
QVQLVESGGGVVQPGRSLRLSCAVSGFTFRSYGMSWVRQAPGKGLEWVALISSGGSYTYYTDSVKGRFTISRDNSKNTLYLQMNSLRAEGTAVYYCSRHGGNFFDYWGQGTTVTVSS

SEQ ID NO: 3251 - protein, 117 aa, Artificial Sequence
  source: /note="Description of Artificial Sequence: Synthetic polypeptide"
QVQLVESGGGVVQPGRSLRLSCAVSGFTFRSYGMSWVRQAPGKGLEWVALISSGGSYTYYTDSVKGRFAISRDNSKNTLYLQMNSLRAEDTAVYYCSRHGGNFFDYWGQGTTVTVSS

SEQ ID NO: 3252 - protein, 117 aa, Artificial Sequence
  source: /note="Description of Artificial Sequence: Synthetic polypeptide"
QVQLVDSGGGVVQPGRSLRLSCAVSGFTFRSYGMSWVRQAPGKGLEWVALISSGGSYTYYTDSVKGRFTISRDNSKNTLYLQMNSLRAEDTAVYYCSRHGGNFFDYWGQGTTVTVSS

SEQ ID NO: 3253 - protein, 117 aa, Artificial Sequence
  source: /note="Description of Artificial Sequence: Synthetic polypeptide"
EVQLVESGGGVVRPGGSLRLSCAVSGFTFRSYGMSWVRQAPGKGLEWVALISSGGSYTYYTDSVKGRFTISRDNAKNSLYLQMNSLRAEDTALYHCSRHGGNFFDYWGQGTTVTVSS

SEQ ID NO: 3254 - protein, 117 aa, Artificial Sequence
  source: /note="Description of Artificial Sequence: Synthetic polypeptide"
EVQLVESGGVVVQPGGSLRLSCAVSGFTFRSYGMSWVRQAPGKGLEWVALISSGGSYTYYTDSVKGRFTISRDNSKNSLYLQMNSLRAEDTALYYCSRHGGNFFDYWGQGTTVTVSS

SEQ ID NO: 3255 - protein, 117 aa, Artificial Sequence
  source: /note="Description of Artificial Sequence: Synthetic polypeptide"
EVQLVESGGGVVQPGGSLRLSCAVSGFTFRSYGMSWVRQAPGKGLEWVALISSGGSYTYYTDSVKGRFTISRDNSKNSLYLQMNSLRTEDTALYYCSRHGGNFFDYWGQGTTVTVSS

SEQ ID NO: 3256 - protein, 117 aa, Artificial Sequence
  source: /note="Description of Artificial Sequence: Synthetic polypeptide"
EVQLVESGGVVVQPGGSLRLSCAVSGFTFRSYGMSWVRQAPGKGLEWVALISSGGSYTYYTDSVKGRFTISRDNSKNSLYLQMNSLRTEDTALYYCSRHGGNFFDYWGQGTTVTVSS

SEQ ID NO: 3257 - protein, 117 aa, Artificial Sequence
  source: /note="Description of Artificial Sequence: Synthetic polypeptide"
EVQLVETGGGLIQPGGSLRLSCAVSGFTFRSYGMSWVRQAPGKGLEWVALISSGGSYTYYTDSVKGRFTISRDNSKNTLYLQMNSLRAEDTAVYYCSRHGGNFFDYWGQGTTVTVSS

SEQ ID NO: 3258 - protein, 117 aa, Artificial Sequence
  source: /note="Description of Artificial Sequence: Synthetic polypeptide"
EVQLVESGGGLVQPGGSLRLSCAVSGFTFRSYGMSWVRQATGKGLEWVALISSGGSYTYYTDSVKGRFTISRENAKNSLYLQMNSLRAGDTAVYYCSRHGGNFFDYWGQGTTVTVSS

SEQ ID NO: 3259 - protein, 117 aa, Artificial Sequence
  source: /note="Description of Artificial Sequence: Synthetic polypeptide"
EVQLVESRGVLVQPGGSLRLSCAVSGFTFRSYGMSWVRQAPGKGLEWVALISSGGSYTYYTDSVKGRFTISRDNSKNTLHLQMNSLRAEDTAVYYCSRHGGNFFDYWGQGTTVTVSS

SEQ ID NO: 3260 - protein, 117 aa, Artificial Sequence
  source: /note="Description of Artificial Sequence: Synthetic polypeptide"
EVQLVESGGGLVQPGRSLRLSCAVSGFTFRSYGMSWVRQAPGKGLEWVALISSGGSYTYYTDSVKGRFTISRDNAKNSLYLQMNSLRAEDMALYYCSRHGGNFFDYWGQGTTVTVSS

SEQ ID NO: 3261 - protein, 117 aa, Artificial Sequence
  source: /note="Description of Artificial Sequence: Synthetic polypeptide"
QVQLVESGGGLVQPGGSLRLSCSVSGFTFRSYGMSWVRQAPGKGLEWVALISSGGSYTYYTDSVKGRFTISRDNSKNTLYLQMNSLRAEDTAVYYCSRHGGNFFDYWGQGTTVTVSS

SEQ ID NO: 3262 - protein, 117 aa, Artificial Sequence
  source: /note="Description of Artificial Sequence: Synthetic polypeptide"
EVQLVESGGGLVQPGGSLRLSCSVSGFTFRSYGMSWVRQAPGKGLEWVALISSGGSYTYYTDSVKGRFTISRDNSKNTLYLQMSSLRAEDTAVYYCSRHGGNFFDYWGQGTTVTVSS

SEQ ID NO: 3263 - protein, 117 aa, Artificial Sequence
  source: /note="Description of Artificial Sequence: Synthetic polypeptide"
QVQLVESGGGVVQPGRSLRLSCAVSGFTFRSYGMSWVRQAPGKGLEWVALISSGGSYTYYTDSVKGRFTISRDNSTNTLFLQMNSLRAEDTAVYYCSRHGGNFFDYWGQGTTVTVSS

SEQ ID NO: 3264 - protein, 117 aa, Artificial Sequence
  source: /note="Description of Artificial Sequence: Synthetic polypeptide"
QVQLLESGGGLVKPGGSLRLSCAVSGFTFRSYGMSWVRQAPGKGLEWVALISSGGSYTYYTDSVKGRFTISRDNAKNSLYLQMNSLRAEDTAVYYCSRHGGNFFDYWGQGTTVTVSS

SEQ ID NO: 3265 - protein, 117 aa, Artificial Sequence
  source: /note="Description of Artificial Sequence: Synthetic polypeptide"
EVQLVESGEGLVQPGGSLRLSCAVSGFTFRSYGMSWVRQAPGKGLEWVALISSGGSYTYYTDSVKGRFTISRDNSKNTLYLQMGSLRAEDMAVYYCSRHGGNFFDYWGQGTTVTVSS

SEQ ID NO: 3266 - protein, 117 aa, Artificial Sequence
  source: /note="Description of Artificial Sequence: Synthetic polypeptide"
EVQLVESGGGLVQPGGSLRLSCAVSGFTFRSYGMSWVRQAPGKGLEWVALISSGGSYTYYTDSVKGRFTISRDNSKNTLYLQMGSLRAEDMAVYYCSRHGGNFFDYWGQGTTVTVSS

SEQ ID NO: 3267 - protein, 117 aa, Artificial Sequence
  source: /note="Description of Artificial Sequence: Synthetic polypeptide"
EVQLVESGGGLVQPGGSLRLSCSVSGFTFRSYGMSWVRQAPGKGLEWVALISSGGSYTYYTDSVKGRFTISRDNSKNTLYVQMSSLRAEDTAVYYCSRHGGNFFDYWGQGTTVTVSS

SEQ ID NO: 3268 - protein, 117 aa, Artificial Sequence
  source: /note="Description of Artificial Sequence: Synthetic polypeptide"
EVQLVESGGGLVQPGGSLRLSCAVSGFTFRSYGMSWVRQAPGKGLEWVALISSGGSYTYYTDSVKGRFIISRDNSRNSLYLQKNRRRAEDMAVYYCSRHGGNFFDYWGQGTTVTVSS

SEQ ID NO: 3269 - protein, 117 aa, Artificial Sequence
  source: /note="Description of Artificial Sequence: Synthetic polypeptide"
EVQLVESGGGLVQPGGSLRLSCAVSGFTFRSYGMSWVHQAPGKGLEWVALISSGGSYTYYTDSVKGRFIISRDNSRNTLYLQTNSLRAEDTAVYYCSRHGGNFFDYWGQGTTVTVSS

SEQ ID NO: 3270 - protein, 117 aa, Artificial Sequence
  source: /note="Description of Artificial Sequence: Synthetic polypeptide"
EVHLVESGGGLVQPGGALRLSCAVSGFTFRSYGMSWVRQATGKGLEWVALISSGGSYTYYTDSVKGRFTISRENAKNSLYLQMNSLRAGDTAVYYCSRHGGNFFDYWGQGTTVTVSS

SEQ ID NO: 3271 - protein, 117 aa, Artificial Sequence
  source: /note="Description of Artificial Sequence: Synthetic polypeptide"
EVQLVESGGGLVQPRGSLRLSCAVSGFTFRSYGMSWVRQAPGKGLEWVALISSGGSYTYYTDSVKGRFTISRDNSKNTLYLQMNNLRAEGTAVYYCSRHGGNFFDYWGQGTTVTVSS

SEQ ID NO: 3272 - protein, 117 aa, Artificial Sequence
  source: /note="Description of Artificial Sequence: Synthetic polypeptide"
EVQLVESGGGLVQPRGSLRLSCAVSGFTFRSYGMSWVRQAPGKGLEWVALISSGGSYTYYTDSVKGRFTISRDNSKNTLYLQMNNLRAEGTAAYYCSRHGGNFFDYWGQGTTVTVSS

SEQ ID NO: 3273 - protein, 117 aa, Artificial Sequence
  source: /note="Description of Artificial Sequence: Synthetic polypeptide"
QVQLVQSGAEVKKPGASVKVSCKVSGFTFRSYGMSWVRQAPGKGLEWVALISSGGSYTYYTDSVKGRFTITRDNSTNTLYMELSSLRSEDTAVYYCSRHGGNFFDYWGQGTTVTVSS

SEQ ID NO: 3274 - protein, 117 aa, Artificial Sequence
  source: /note="Description of Artificial Sequence: Synthetic polypeptide"
QVQLVQSGSELKKPGASVKVSCKVSGFTFRSYGMSWVRQAPGQGLEWVALISSGGSYTYYTDSVKGRFVISRDNSVNTLYLQISSLKAEDTAVYYCSRHGGNFFDYWGQGTTVTVSS

SEQ ID NO: 3275-3277 - skipped (3 entries)

SEQ ID NO: 3278 - protein, 469 aa, Artificial Sequence
  source: /note="Description of Artificial Sequence: Synthetic polypeptide"
METDTLLLWVLLLWVPGSTGQVQLVQSGAEVKKPGSSVKVSCKASGYSFTTYYIHWVRQAPGQGLEWMGWFFPGSGNIKYNEKFKGRVTITADTSTSTAYMELSSLRSEDTAVYYCAGSYYSYDVLDYWGQGTTVTVSSASTKGPSVFPLAPSSKSTSGGTAALGCLVKDYFPEPVTVSWNSGALTSGVHTFPAVLQSSGLYSLSSVVTVPSSSLGTQTYICNVNHKPSNTKVDKRVEPKSCDKTHTCPPCPAPELLGGPSVFLFPPKPKDTLMISRTPEVTCVVVDVSHEDPEVKFNWYVDGVEVHNAKTKPREEQYNSTYRVVSVLTVLHQDWLNGKEYKCKVSNKALPAPIEKTISKAKGQPREPQVYTLPPSREEMTKNQVSLTCLVKGFYPSDIAVEWESNGQPENNYKTTPPVLDSDGSFFLYSKLTVDKSRWQQGNVFSCSVMHEALHNHYTQKSLSLSPGK

SEQ ID NO: 3279 - protein, 234 aa, Artificial Sequence
  source: /note="Description of Artificial Sequence: Synthetic polypeptide"
METDTLLLWVLLLWVPGSTGDIQMTQSPSSLSASVGDRVTITCKASQNVGINVVWHQQKPGKVPKALIYSSSHRYSGVPSRFSGSGSGTDFTLTISSLQPEDVATYFCQQFKSYPLTFGQGTKLEIKRTVAAPSVFIFPPSDEQLKSGTASVVCLLNNFYPREAKVQWKVDNALQSGNSQESVTEQDSKDSTYSLSSTLTLSKADYEKHKVYACEVTHQGLSSPVTKSFNRGEC

SEQ ID NO: 3280 - protein, 247 aa, Artificial Sequence
  source: /note="Description of Artificial Sequence: Synthetic polypeptide"
METDTLLLWVLLLWVPGSTGDKTHTCPPCPAPELLGGPSVFLFPPKPKDTLMISRTPEVTCVVVDVSHEDPEVKFNWYVDGVEVHNAKTKPREEQYNSTYRVVSVLTVLHQDWLNGKEYKCKVSNKALPAPIEKTISKAKGQPREPQVYTLPPCREEMTKNQVSLWCLVKGFYPSDIAVEWESNGQPENNYKTTPPVLDSDGSFFLYSKLTVDKSRWQQGNVFSCSVMHEALHNRFTQKSLSLSPGK

SEQ ID NO: 3281 - protein, 520 aa, Artificial Sequence
  source: /note="Description of Artificial Sequence: Synthetic polypeptide"
METDTLLLWVLLLWVPGSTGEVQLVESGGGLVQPGGSLRLSCAASGFTFSNFGMHWVRQAPGKGLEWVSYISSGSSTIYYADTLKGRFTISRDNSKNTLYLQMNSLRAEDTAVYYCARRGEGAMDYWGQGTTVTVSSGGGGSGGGGSGGGGSGGGGSDNQLTQSPSFLSASVGDRVTITCRASSSVNYIYWYQQKPGKAPKLLIYYTSNLAPGVPSRFSGSGSGNEYTLTISSLQPEDFATYYCQQFTSSPFTFGQGTKLEIKGGGGSDKTHTCPPCPAPELLGGPSVFLFPPKPKDTLMISRTPEVTCVVVDVSHEDPEVKFNWYVDGVEVHNAKTKPREEQYNSTYRVVSVLTVLHQDWLNGKEYKCKVSNKALPAPIEKTISKAKGQPREPQVCTLPPSREEMTKNQVSLSCAVKGFYPSDIAVEWESNGQPENNYKTTPPVLDSDGSFFLVSKLTVDKSRWQQGNVFSCSVMHEALHNHYTQKSLSLSPGKGGGGSGGGGSGLNDIFEAQKIEWHE

SEQ ID NO: 3282-3283 - skipped (2 entries)

SEQ ID NO: 3284 - protein, 469 aa, Artificial Sequence
  source: /note="Description of Artificial Sequence: Synthetic polypeptide"
METDTLLLWVLLLWVPGSTGQVQLQQSGPELVKPGASVKISCKASGYAFSSSWMNWVKQRPGQGLEWIGRIYPGDGDTKYNGKFKGKATLTADKSSSTAYMHLSSLTSVDSAVYFCARRGTGGWYFDVWGAGTTVTVSSAKTTAPSVYPLAPVCGDTTGSSVTLGCLVKGYFPEPVTLTWNSGSLSSGVHTFPAVLQSDLYTLSSSVTVTSSTWPSQSITCNVAHPASSTKVDKKIEPRGPTIKPCPPCKCPAPNLLGGPSVFIFPPKIKDVLMISLSPIVTCVVVDVSEDDPDVQISWFVNNVEVHTAQTQTHREDYNSTLRVVSALPIQHQDWMSGKEFKCKVNNKDLPAPIERTISKPKGSVRAPQVYVLPPPEEEMTKKQVTLTCMVTDFMPEDIYVEWTNNGKTELNYKNTEPVLDSDGSYFMYSKLRVEKKNWVERNSYSCSVVHEGLHNHHTTKSFSRTPGK

SEQ ID NO: 3285 - protein, 238 aa, Artificial Sequence
  source: /note="Description of Artificial Sequence: Synthetic polypeptide"
METDTLLLWVLLLWVPGSTGDIVLTQSPASLAVSLGQRATISCRASESVDSSGNSFMHWYQQKPGQPPQLLIYRASNLESGIPARFSGSGSRTDFTLTINPVEADDVATFYCQQSFDDPFTFGSGTKLEIKRADAAPTVSIFPPSSEQLTSGGASVVCFLNNFYPKDINVKWKIDGSERQNGVLNSWTDQDSKDSTYSMSSTLTLTKDEYERHNSYTCEATHKTSTSPIVKSFNRNEC

SEQ ID NO: 3286-3288 - skipped (3 entries)

SEQ ID NO: 3289 - protein, 107 aa, Artificial Sequence; identical to SEQ ID NO: 108
  source: /note="Description of Artificial Sequence: Synthetic polypeptide"
  VARIANT (30)..(30): /replace="Glu" or "Ala" or "Asp"
  VARIANT (31)..(31): /replace="Asp"
  VARIANT (32)..(32): /replace="Lys"
  VARIANT (36)..(36): /replace="His"
  VARIANT (56)..(56): /replace="Ser"
  SITE (1)..(107): /note="Variant residues given in the sequence have no preference with respect to those in the annotations for variant positions"

SEQ ID NO: 3290 - protein, 119 aa, Artificial Sequence; identical to SEQ ID NO: 148
  source: /note="Description of Artificial Sequence: Synthetic polypeptide"
  VARIANT (27)..(27): /replace="Thr" or "Gly" or "Tyr"
  VARIANT (28)..(28): /replace="Thr" or "Ser"
  VARIANT (30)..(30): /replace="Arg" or "Asp" or "Lys" or "Thr"
  VARIANT (31)..(31): /replace="Asp" or "Lys" or "Thr" or "Asn"
  VARIANT (32)..(32): /replace="Phe" or "Thr" or "Ile" or "Tyr" or "Gly"
  VARIANT (50)..(50): /replace="Trp"
  VARIANT (51)..(51): /replace="Ile" or "Phe"
  VARIANT (52)..(52): /replace="Ser" or "Tyr"
  VARIANT (53)..(53): /replace="Pro"
  VARIANT (57)..(57): /replace="Ser"
  VARIANT (58)..(58): /replace="Val" or "Tyr" or "Ile"
  VARIANT (59)..(59): /replace="Arg"
  VARIANT (98)..(98): /replace="Val"
  VARIANT (100)..(100): /replace="Ile"
  VARIANT (103)..(103): /replace="Ala"
  VARIANT (104)..(104): /replace="Gly"
  SITE (1)..(119): /note="Variant residues given in the sequence have no preference with respect to those in the annotations for variant positions"

SEQ ID NO: 3291-3376 - skipped (86 entries)

SEQ ID NO: 3377 - protein, 107 aa, Artificial Sequence; identical to SEQ ID NO: 93
  source: /note="Description of Artificial Sequence: Synthetic polypeptide"

SEQ ID NO: 3378 - protein, 107 aa, Artificial Sequence; identical to SEQ ID NO: 117
  source: /note="Description of Artificial Sequence: Synthetic polypeptide"

SEQ ID NO: 3379 - protein, 107 aa, Artificial Sequence; identical to SEQ ID NO: 199
  source: /note="Description of Artificial Sequence: Synthetic polypeptide"

SEQ ID NO: 3380 - protein, 107 aa, Artificial Sequence; identical to SEQ ID NO: 181
  source: /note="Description of Artificial Sequence: Synthetic polypeptide"

SEQ ID NO: 3381 - protein, 107 aa, Artificial Sequence; identical to SEQ ID NO: 87
  source: /note="Description of Artificial Sequence: Synthetic polypeptide"

SEQ ID NO: 3382 - protein, 107 aa, Artificial Sequence; identical to SEQ ID NO: 160
  source: /note="Description of Artificial Sequence: Synthetic polypeptide"

SEQ ID NO: 3383 - protein, 107 aa, Artificial Sequence; identical to SEQ ID NO: 147
  source: /note="Description of Artificial Sequence: Synthetic polypeptide"

SEQ ID NO: 3384 - protein, 107 aa, Artificial Sequence; identical to SEQ ID NO: 141
  source: /note="Description of Artificial Sequence: Synthetic polypeptide"

SEQ ID NO: 3385 - protein, 107 aa, Artificial Sequence; identical to SEQ ID NO: 81
  source: /note="Description of Artificial Sequence: Synthetic polypeptide"

SEQ ID NO: 3386 - protein, 107 aa, Artificial Sequence; identical to SEQ ID NO: 90
  source: /note="Description of Artificial Sequence: Synthetic polypeptide"

SEQ ID NO: 3387 - protein, 107 aa, Artificial Sequence; identical to SEQ ID NO: 102
  source: /note="Description of Artificial Sequence: Synthetic polypeptide"

SEQ ID NO: 3388 - protein, 107 aa, Artificial Sequence; identical to SEQ ID NO: 99
  source: /note="Description of Artificial Sequence: Synthetic polypeptide"

SEQ ID NO: 3389 - protein, 107 aa, Artificial Sequence; identical to SEQ ID NO: 108
  source: /note="Description of Artificial Sequence: Synthetic polypeptide"

SEQ ID NO: 3390 - protein, 119 aa, Artificial Sequence; identical to SEQ ID NO: 221
  source: /note="Description of Artificial Sequence: Synthetic polypeptide"

SEQ ID NO: 3391 - protein, 119 aa, Artificial Sequence; identical to SEQ ID NO: 223
  source: /note="Description of Artificial Sequence: Synthetic polypeptide"

SEQ ID NO: 3392 - protein, 119 aa, Artificial Sequence; identical to SEQ ID NO: 225
  source: /note="Description of Artificial Sequence: Synthetic polypeptide"

SEQ ID NO: 3393 - protein, 119 aa, Artificial Sequence; identical to SEQ ID NO: 219
  source: /note="Description of Artificial Sequence: Synthetic polypeptide"

SEQ ID NO: 3394 - protein, 119 aa, Artificial Sequence; identical to SEQ ID NO: 217
  source: /note="Description of Artificial Sequence: Synthetic polypeptide"

SEQ ID NO: 3395 - protein, 119 aa, Artificial Sequence; identical to SEQ ID NO: 211
  source: /note="Description of Artificial Sequence: Synthetic polypeptide"

SEQ ID NO: 3396 - protein, 119 aa, Artificial Sequence; identical to SEQ ID NO: 215
  source: /note="Description of Artificial Sequence: Synthetic polypeptide"

SEQ ID NO: 3397 - protein, 119 aa, Artificial Sequence; identical to SEQ ID NO: 213
  source: /note="Description of Artificial Sequence: Synthetic polypeptide"

SEQ ID NO: 3398 - protein, 119 aa, Artificial Sequence; identical to SEQ ID NO: 207
  source: /note="Description of Artificial Sequence: Synthetic polypeptide"

SEQ ID NO: 3399 - protein, 119 aa, Artificial Sequence; identical to SEQ ID NO: 209
  source: /note="Description of Artificial Sequence: Synthetic polypeptide"

SEQ ID NO: 3400 - protein, 119 aa, Artificial Sequence; identical to SEQ ID NO: 121
  source: /note="Description of Artificial Sequence: Synthetic polypeptide"

SEQ ID NO: 3401 - protein, 119 aa, Artificial Sequence; identical to SEQ ID NO: 182
  source: /note="Description of Artificial Sequence: Synthetic polypeptide"

SEQ ID NO: 3402 - protein, 119 aa, Artificial Sequence; identical to SEQ ID NO: 176
  source: /note="Description of Artificial Sequence: Synthetic polypeptide"

SEQ ID NO: 3403 - protein, 119 aa, Artificial Sequence; identical to SEQ ID NO: 158
  source: /note="Description of Artificial Sequence: Synthetic polypeptide"

SEQ ID NO: 3404 - protein, 119 aa, Artificial Sequence; identical to SEQ ID NO: 155
  source: /note="Description of Artificial Sequence: Synthetic polypeptide"

SEQ ID NO: 3405 - protein, 119 aa, Artificial Sequence; identical to SEQ ID NO: 118
  source: /note="Description of Artificial Sequence: Synthetic polypeptide"

SEQ ID NO: 3406 - protein, 119 aa, Artificial Sequence; identical to SEQ ID NO: 82
  source: /note="Description of Artificial Sequence: Synthetic polypeptide"

SEQ ID NO: 3407 - protein, 119 aa, Artificial Sequence; identical to SEQ ID NO: 106
  source: /note="Description of Artificial Sequence: Synthetic polypeptide"

SEQ ID NO: 3408 - protein, 119 aa, Artificial Sequence; identical to SEQ ID NO: 200
  source: /note="Description of Artificial Sequence: Synthetic polypeptide"

SEQ ID NO: 3409 - protein, 119 aa, Artificial Sequence; identical to SEQ ID NO: 124
  source: /note="Description of Artificial Sequence: Synthetic polypeptide"

SEQ ID NO: 3410 - protein, 119 aa, Artificial Sequence; identical to SEQ ID NO: 94
  source: /note="Description of Artificial Sequence: Synthetic polypeptide"

SEQ ID NO: 3411 - protein, 119 aa, Artificial Sequence; identical to SEQ ID NO: 151
  source: /note="Description of Artificial Sequence: Synthetic polypeptide"

SEQ ID NO: 3412 - protein, 119 aa, Artificial Sequence; identical to SEQ ID NO: 197
  source: /note="Description of Artificial Sequence: Synthetic polypeptide"

SEQ ID NO: 3413 - protein, 119 aa, Artificial Sequence; identical to SEQ ID NO: 130
  source: /note="Description of Artificial Sequence: Synthetic polypeptide"

SEQ ID NO: 3414 - protein, 119 aa, Artificial Sequence; identical to SEQ ID NO: 173
  source: /note="Description of Artificial Sequence: Synthetic polypeptide"

SEQ ID NO: 3415 - protein, 119 aa, Artificial Sequence; identical to SEQ ID NO: 142
  source: /note="Description of Artificial Sequence: Synthetic polypeptide"

SEQ ID NO: 3416 - protein, 119 aa, Artificial Sequence; identical to SEQ ID NO: 91
  source: /note="Description of Artificial Sequence: Synthetic polypeptide"

SEQ ID NO: 3417 - protein, 119 aa, Artificial Sequence; identical to SEQ ID NO: 139
  source: /note="Description of Artificial Sequence: Synthetic polypeptide"

SEQ ID NO: 3418 - protein, 119 aa, Artificial Sequence; identical to SEQ ID NO: 185
  source: /note="Description of Artificial Sequence: Synthetic polypeptide"

SEQ ID NO: 3419 - protein, 119 aa, Artificial Sequence; identical to SEQ ID NO: 133
  source: /note="Description of Artificial Sequence: Synthetic polypeptide"

SEQ ID NO: 3420 - protein, 119 aa, Artificial Sequence; identical to SEQ ID NO: 188
  source: /note="Description of Artificial Sequence: Synthetic polypeptide"

SEQ ID NO: 3421 - protein, 119 aa, Artificial Sequence; identical to SEQ ID NO: 109
  source: /note="Description of Artificial Sequence: Synthetic polypeptide"

SEQ ID NO: 3422 - protein, 119 aa, Artificial Sequence; identical to SEQ ID NO: 97
  source: /note="Description of Artificial Sequence: Synthetic polypeptide"

SEQ ID NO: 3423 - protein, 119 aa, Artificial Sequence; identical to SEQ ID NO: 85
  source: /note="Description of Artificial Sequence: Synthetic polypeptide"

SEQ ID NO: 3424 - protein, 119 aa, Artificial Sequence; identical to SEQ ID NO: 115
  source: /note="Description of Artificial Sequence: Synthetic polypeptide"

SEQ ID NO: 3425 - protein, 119 aa, Artificial Sequence; identical to SEQ ID NO: 191
  source: /note="Description of Artificial Sequence: Synthetic polypeptide"

SEQ ID NO: 3426 - protein, 119 aa, Artificial Sequence; identical to SEQ ID NO: 136
  source: /note="Description of Artificial Sequence: Synthetic polypeptide"

SEQ ID NO: 3427 - protein, 119 aa, Artificial Sequence; identical to SEQ ID NO: 203
  source: /note="Description of Artificial Sequence: Synthetic polypeptide"

SEQ ID NO: 3428 - protein, 119 aa, Artificial Sequence; identical to SEQ ID NO: 103
  source: /note="Description of Artificial Sequence: Synthetic polypeptide"

SEQ ID NO: 3429 - protein, 119 aa, Artificial Sequence; identical to SEQ ID NO: 205
  source: /note="Description of Artificial Sequence: Synthetic polypeptide"

SEQ ID NO: 3430 - protein, 119 aa, Artificial Sequence; identical to SEQ ID NO: 100
  source: /note="Description of Artificial Sequence: Synthetic polypeptide"

SEQ ID NO: 3431 - protein, 119 aa, Artificial Sequence; identical to SEQ ID NO: 179
  source: /note="Description of Artificial Sequence: Synthetic polypeptide"

SEQ ID NO: 3432 - protein, 119 aa, Artificial Sequence; identical to SEQ ID NO: 88
  source: /note="Description of Artificial Sequence: Synthetic polypeptide"

SEQ ID NO: 3433 - protein, 119 aa, Artificial Sequence; identical to SEQ ID NO: 167
  source: /note="Description of Artificial Sequence: Synthetic polypeptide"

SEQ ID NO: 3434 - protein, 119 aa, Artificial Sequence; identical to SEQ ID NO: 161
  source: /note="Description of Artificial Sequence: Synthetic polypeptide"

SEQ ID NO: 3435 - protein, 119 aa, Artificial Sequence; identical to SEQ ID NO: 145
  source: /note="Description of Artificial Sequence: Synthetic polypeptide"

SEQ ID NO: 3436 - protein, 119 aa, Artificial Sequence; identical to SEQ ID NO: 148
  source: /note="Description of Artificial Sequence: Synthetic polypeptide"

SEQ ID NO: 3437-5999 - skipped (2563 entries)

SEQ ID NO: 6000 - protein, 7 aa, Artificial Sequence
  source: /note="Description of Artificial Sequence: Synthetic peptide"
TGGYHWN

SEQ ID NO: 6001 - protein, 16 aa, Artificial Sequence
  source: /note="Description of Artificial Sequence: Synthetic peptide"
YIYSSGSTSYNPSLKS

SEQ ID NO: 6002 - protein, 8 aa, Artificial Sequence
  source: /note="Description of Artificial Sequence: Synthetic peptide"
GNWHYFDF

SEQ ID NO: 6003 - protein, 30 aa, Artificial Sequence
  source: /note="Description of Artificial Sequence: Synthetic polypeptide"
QIQLQESGPGLVKPSQSLSLTCSVTGFSIN

SEQ ID NO: 6004 - protein, 14 aa, Artificial Sequence
  source: /note="Description of Artificial Sequence: Synthetic peptide"
WIRQFPGKKLEWMG

SEQ ID NO: 6005 - protein, 32 aa, Artificial Sequence
  source: /note="Description of Artificial Sequence: Synthetic polypeptide"
RISITRDTSKNQFFLQLNSVTTEDTATYYCAR

SEQ ID NO: 6006 - protein, 11 aa, Artificial Sequence
  source: /note="Description of Artificial Sequence: Synthetic peptide"
WGQGTMVTVSS

SEQ ID NO: 6007 - protein, 7 aa, Artificial Sequence
  source: /note="Description of Artificial Sequence: Synthetic peptide"
TGGYHWN

SEQ ID NO: 6008 - protein, 16 aa, Artificial Sequence
  source: /note="Description of Artificial Sequence: Synthetic peptide"
YIYSSGTTRYNPSLKS

SEQ ID NO: 6009 - protein, 8 aa, Artificial Sequence
  source: /note="Description of Artificial Sequence: Synthetic peptide"
GNWHYFDY

SEQ ID NO: 6010 - protein, 30 aa, Artificial Sequence; identical to SEQ ID NO: 6003
  source: /note="Description of Artificial Sequence: Synthetic polypeptide"

SEQ ID NO: 6011 - protein, 14 aa, Artificial Sequence
  source: /note="Description of Artificial Sequence: Synthetic peptide"
WIRQFPGKKLEWMG

SEQ ID NO: 6012 - protein, 32 aa, Artificial Sequence
  source: /note="Description of Artificial Sequence: Synthetic polypeptide"
RISITRDTSKNQFFLQLNSVTPEDTATYYCTR

SEQ ID NO: 6013 - protein, 11 aa, Artificial Sequence
  source: /note="Description of Artificial Sequence: Synthetic peptide"
WGQGTLVAVSS

SEQ ID NO: 6014 - protein, 30 aa, Artificial Sequence
  source: /note="Description of Artificial Sequence: Synthetic polypeptide"
QIQLQESGPGLVKPSETLSLTCTVSGFSIN

SEQ ID NO: 6015 - protein, 14 aa, Artificial Sequence
  source: /note="Description of Artificial Sequence: Synthetic peptide"
WIRQPAGKGLEWIG

SEQ ID NO: 6016 - protein, 32 aa, Artificial Sequence
  source: /note="Description of Artificial Sequence: Synthetic polypeptide"
RVTMSRDTSKNQFSLKLSSVTAADTAVYYCAR

SEQ ID NO: 6017 - protein, 11 aa, Artificial Sequence
  source: /note="Description of Artificial Sequence: Synthetic peptide"
WGQGTMVTVSS

SEQ ID NO: 6018 - protein, 30 aa, Artificial Sequence
  source: /note="Description of Artificial Sequence: Synthetic polypeptide"
QIQLQESGPGLVKPSQTLSLTCTVSGFSIN

SEQ ID NO: 6019 - protein, 14 aa, Artificial Sequence
  source: /note="Description of Artificial Sequence: Synthetic peptide"
WIRQHPGKGLEWIG

SEQ ID NO: 6020 - protein, 32 aa, Artificial Sequence
  source: /note="Description of Artificial Sequence: Synthetic polypeptide"
LVTISRDTSKNQFSLKLSSVTAADTAVYYCAR

SEQ ID NO: 6021 - protein, 11 aa, Artificial Sequence
  source: /note="Description of Artificial Sequence: Synthetic peptide"
WGQGTMVTVSS

SEQ ID NO: 6022 - protein, 30 aa, Artificial Sequence
  source: /note="Description of Artificial Sequence: Synthetic polypeptide"
EIQLLESGGGLVQPGGSLRLSCAVSGFSIN

SEQ ID NO: 6023 - protein, 14 aa, Artificial Sequence
  source: /note="Description of Artificial Sequence: Synthetic peptide"
WVRQAPGKGLEWVG

SEQ ID NO: 6024 - protein, 32 aa, Artificial Sequence
  source: /note="Description of Artificial Sequence: Synthetic polypeptide"
RFTISRDTSKNTFYLQMNSLRAEDTAVYYCAR

SEQ ID NO: 6025 - protein, 11 aa, Artificial Sequence
  source: /note="Description of Artificial Sequence: Synthetic peptide"
WGQGTMVTVSS

SEQ ID NO: 6026 - protein, 30 aa, Artificial Sequence
  source: /note="Description of Artificial Sequence: Synthetic polypeptide"
QIQLVQSGAEVKKPGSSVKVSCKVSGFSIN

SEQ ID NO: 6027 - protein, 14 aa, Artificial Sequence
  source: /note="Description of Artificial Sequence: Synthetic peptide"
WVRQAPGQGLEWMG

SEQ ID NO: 6028 - protein, 32 aa, Artificial Sequence
  source: /note="Description of Artificial Sequence: Synthetic polypeptide"
RVTITRDTSTNTFYMELSSLRSEDTAVYYCAR

SEQ ID NO: 6029 - protein, 11 aa, Artificial Sequence
  source: /note="Description of Artificial Sequence: Synthetic peptide"
WGQGTMVTVSS

SEQ ID NO: 6030 - protein, 30 aa, Artificial Sequence
  source: /note="Description of Artificial Sequence: Synthetic polypeptide"
EIQLVESGGGLVQPGGSLRLSCAVSGFSIN

SEQ ID NO: 6031 - skipped

SEQ ID NO: 6032 - protein, 14 aa, Artificial Sequence
  source: /note="Description of Artificial Sequence: Synthetic peptide"
WVRQAPGKGLEWVG

SEQ ID NO: 6033 - protein, 32 aa, Artificial Sequence
  source: /note="Description of Artificial Sequence: Synthetic polypeptide"
RFTISRDTAKNSFYLQMNSLRAEDTAVYYCAR

SEQ ID NO: 6034 - protein, 11 aa, Artificial Sequence
  source: /note="Description of Artificial Sequence: Synthetic peptide"
WGQGTMVTVSS

SEQ ID NO: 6035 - protein, 30 aa, Artificial Sequence
  source: /note="Description of Artificial Sequence: Synthetic polypeptide"
QIQLVQSGAEVKKPGASVKVSCKVSGFSIN

SEQ ID NO: 6036 - protein, 14 aa, Artificial Sequence
  source: /note="Description of Artificial Sequence: Synthetic peptide"
WVRQAPGQGLEWMG

SEQ ID NO: 6037 - protein, 32 aa, Artificial Sequence
  source: /note="Description of Artificial Sequence: Synthetic polypeptide"
RVTMTRDTSTNTFYMELSSLRSEDTAVYYCAR

SEQ ID NO: 6038 - protein, 11 aa, Artificial Sequence
  source: /note="Description of Artificial Sequence: Synthetic peptide"
WGQGTMVTVSS

SEQ ID NO: 6039 - protein, 30 aa, Artificial Sequence; identical to SEQ ID NO: 6018
  source: /note="Description of Artificial Sequence: Synthetic polypeptide"

SEQ ID NO: 6040 - protein, 14 aa, Artificial Sequence
  source: /note="Description of Artificial Sequence: Synthetic peptide"
WIRQHPGKGLEWIG

SEQ ID NO: 6041 - protein, 32 aa, Artificial Sequence; identical to SEQ ID NO: 6020
  source: /note="Description of Artificial Sequence: Synthetic polypeptide"

SEQ ID NO: 6042 - protein, 11 aa, Artificial Sequence
  source: /note="Description of Artificial Sequence: Synthetic peptide"
WGQGTLVTVSS

SEQ ID NO: 6043 - protein, 30 aa, Artificial Sequence; identical to SEQ ID NO: 6014
  source: /note="Description of Artificial Sequence: Synthetic polypeptide"

SEQ ID NO: 6044 - protein, 14 aa, Artificial Sequence
  source: /note="Description of Artificial Sequence: Synthetic peptide"
WIRQPAGKGLEWIG

SEQ ID NO: 6045 - protein, 32 aa, Artificial Sequence; identical to SEQ ID NO: 6016
  source: /note="Description of Artificial Sequence: Synthetic polypeptide"

SEQ ID NO: 6046 - protein, 11 aa, Artificial Sequence
  source: /note="Description of Artificial Sequence: Synthetic peptide"
WGQGTLVTVSS

SEQ ID NO: 6047 - protein, 30 aa, Artificial Sequence; identical to SEQ ID NO: 6022
  source: /note="Description of Artificial Sequence: Synthetic polypeptide"

SEQ ID NO: 6048 - protein, 14 aa, Artificial Sequence
  source: /note="Description of Artificial Sequence: Synthetic peptide"
WVRQAPGKGLEWVG

SEQ ID NO: 6049 - protein, 32 aa, Artificial Sequence; identical to SEQ ID NO: 6024
  source: /note="Description of Artificial Sequence: Synthetic polypeptide"

SEQ ID NO: 6050 - protein, 11 aa, Artificial Sequence
  source: /note="Description of Artificial Sequence: Synthetic peptide"
WGQGTLVTVSS

SEQ ID NO: 6051 - protein, 30 aa, Artificial Sequence
  source: /note="Description of Artificial Sequence: Synthetic polypeptide"
QIQLVESGGGLVKPGGSLRLSCAVSGFSIN

SEQ ID NO: 6052 - protein, 14 aa, Artificial Sequence
  source: /note="Description of Artificial Sequence: Synthetic peptide"
WIRQAPGKGLEWVG

SEQ ID NO: 6053 - protein, 32 aa, Artificial Sequence; identical to SEQ ID NO: 6033
  source: /note="Description of Artificial Sequence: Synthetic polypeptide"

SEQ ID NO: 6054 - protein, 11 aa, Artificial Sequence
  source: /note="Description of Artificial Sequence: Synthetic peptide"
WGQGTLVTVSS

SEQ ID NO: 6055 - protein, 30 aa, Artificial Sequence; identical to SEQ ID NO: 6035
  source: /note="Description of Artificial Sequence: Synthetic polypeptide"

SEQ ID NO: 6056 - protein, 14 aa, Artificial Sequence
  source: /note="Description of Artificial Sequence: Synthetic peptide"
WVRQAPGQGLEWMG

SEQ ID NO: 6057 - protein, 32 aa, Artificial Sequence; identical to SEQ ID NO: 6037
  source: /note="Description of Artificial Sequence: Synthetic polypeptide"

SEQ ID NO: 6058 - protein, 11 aa, Artificial Sequence
  source: /note="Description of Artificial Sequence: Synthetic peptide"
WGQGTLVTVSS

SEQ ID NO: 6059 - protein, 30 aa, Artificial Sequence
  source: /note="Description of Artificial Sequence: Synthetic polypeptide"
EIQLVQSGAEVKKPGATVKISCKVSGFSIN

SEQ ID NO: 6060 - protein, 14 aa, Artificial Sequence
  source: /note="Description of Artificial Sequence: Synthetic peptide"
WVQQAPGKGLEWMG

SEQ ID NO: 6061 - protein, 32 aa, Artificial Sequence; identical to SEQ ID NO: 6028
  source: /note="Description of Artificial Sequence: Synthetic polypeptide"

SEQ ID NO: 6062 - protein, 11 aa, Artificial Sequence
  source: /note="Description of Artificial Sequence: Synthetic peptide"
WGQGTLVTVSS

SEQ ID NO: 6063 - protein, 11 aa, Artificial Sequence
  source: /note="Description of Artificial Sequence: Synthetic peptide"
SGERLSDKYVH

SEQ ID NO: 6064 - protein, 7 aa, Artificial Sequence
  source: /note="Description of Artificial Sequence: Synthetic peptide"
ENDKRPS

SEQ ID NO: 6065 - protein, 10 aa, Artificial Sequence
  source: /note="Description of Artificial Sequence: Synthetic peptide"
QAGYEADYYC

SEQ ID NO: 6066 - protein, 22 aa, Artificial Sequence
  source: /note="Description of Artificial Sequence: Synthetic peptide"
SYTLTQPPLLSVALGHKATITC

SEQ ID NO: 6067 - protein, 15 aa, Artificial Sequence
  source: /note="Description of Artificial Sequence: Synthetic peptide"
WYQQKPGRAPVMVIY

SEQ ID NO: 6068 - protein, 22 aa, Artificial Sequence
  source: /note="Description of Artificial Sequence: Synthetic peptide"
GIPDQFSGSNSGNIATLTISKA

SEQ ID NO: 6069 - protein, 10 aa, Artificial Sequence
  source: /note="Description of Artificial Sequence: Synthetic peptide"
FGSGTQLTVL

SEQ ID NO: 6070 - protein, 11 aa, Artificial Sequence
  source: /note="Description of Artificial Sequence: Synthetic peptide"
SGENLSDKYVH

SEQ ID NO: 6071 - protein, 7 aa, Artificial Sequence
  source: /note="Description of Artificial Sequence: Synthetic peptide"
ENEKRPS

SEQ ID NO: 6072 - protein, 10 aa, Artificial Sequence
  source: /note="Description of Artificial Sequence: Synthetic peptide"
HYWESINSVV

SEQ ID NO: 6073 - protein, 22 aa, Artificial Sequence
  source: /note="Description of Artificial Sequence: Synthetic peptide"
SYTLTQPPSLSVAPGQKATIIC

SEQ ID NO: 6074 - protein, 15 aa, Artificial Sequence
  source: /note="Description of Artificial Sequence: Synthetic peptide"
WYQQKPGRAPVMVIY

SEQ ID NO: 6075 - protein, 32 aa, Artificial Sequence
  source: /note="Description of Artificial Sequence: Synthetic polypeptide"
GIPDQFSGSNSGNIATLTISKAQPGSEADYYC

SEQ ID NO: 6076 - protein, 10 aa, Artificial Sequence
  source: /note="Description of Artificial Sequence: Synthetic peptide"
FGSGTHLTVL

SEQ ID NO: 6077 - protein, 22 aa, Artificial Sequence
  source: /note="Description of Artificial Sequence: Synthetic peptide"
QSVTTQPPSVSGAPGQRVTISC

SEQ ID NO: 6078 - protein, 15 aa, Artificial Sequence
  source: /note="Description of Artificial Sequence: Synthetic peptide"
WYQQLPGTAPKMLIY

SEQ ID NO: 6079 - protein, 32 aa, Artificial Sequence
  source: /note="Description of Artificial Sequence: Synthetic polypeptide"
GVPDRFSGSNSGNSASLAITGLQAEDEADYYC

SEQ ID NO: 6080 - protein, 10 aa, Artificial Sequence
  source: /note="Description of Artificial Sequence: Synthetic peptide"
FGGGTQLTVL

SEQ ID NO: 6081 - protein, 22 aa, Artificial Sequence
  source: /note="Description of Artificial Sequence: Synthetic peptide"
QSVTTQPPSASGTPGQRVTISC

SEQ ID NO: 6082 - protein, 15 aa, Artificial Sequence
  source: /note="Description of Artificial Sequence: Synthetic peptide"
WYQQLPGTAPKMLIY

SEQ ID NO: 6083 - protein, 32 aa, Artificial Sequence
  source: /note="Description of Artificial Sequence: Synthetic polypeptide"
GVPDRFSGSNSGNSASLAISGLQSEDEADYYC

SEQ ID NO: 6084 - protein, 10 aa, Artificial Sequence
  source: /note="Description of Artificial Sequence: Synthetic peptide"
FGGGTQLTVL

SEQ ID NO: 6085 - protein, 22 aa, Artificial Sequence
  source: /note="Description of Artificial Sequence: Synthetic peptide"
QSVTTQPPSASGTPGQRVTISC

SEQ ID NO: 6086 - protein, 15 aa, Artificial Sequence
  source: /note="Description of Artificial Sequence: Synthetic peptide"
WYQQLPGTAPKMLIY

SEQ ID NO: 6087 - protein, 32 aa, Artificial Sequence
  source: /note="Description of Artificial Sequence: Synthetic polypeptide"
GVPDRFSGSNSGNSASLAISGLRSEDEADYYC

SEQ ID NO: 6088 - protein, 10 aa, Artificial Sequence
  source: /note="Description of Artificial Sequence: Synthetic peptide"
FGGGTQLTVL

SEQ ID NO: 6089 - protein, 22 aa, Artificial Sequence
  source: /note="Description of Artificial Sequence: Synthetic peptide"
SSETTQPHSVSVATAQMARITC

SEQ ID NO: 6090 - protein, 15 aa, Artificial Sequence
  source: /note="Description of Artificial Sequence: Synthetic peptide"
WYQQKPGQDPVMVIY

SEQ ID NO: 6091 - protein, 32 aa, Artificial Sequence
  source: /note="Description of Artificial Sequence: Synthetic polypeptide"
GIPERFSGSNPGNTATLTISRIEAGDEADYYC

SEQ ID NO: 6092 - protein, 10 aa, Artificial Sequence
  source: /note="Description of Artificial Sequence: Synthetic peptide"
FGGGTQLTVL

SEQ ID NO: 6093 - protein, 23 aa, Artificial Sequence
  source: /note="Description of Artificial Sequence: Synthetic peptide"
DIQMTQSPSTLSASVGDRVTITC

SEQ ID NO: 6094 - protein, 15 aa, Artificial Sequence
  source: /note="Description of Artificial Sequence: Synthetic peptide"
WYQQKPGKAPKMLIY

SEQ ID NO: 6095 - protein, 32 aa, Artificial Sequence
  source: /note="Description of Artificial Sequence: Synthetic polypeptide"
GVPSRFSGSNSGNEATLTISSLQPDDFATYYC

SEQ ID NO: 6096 - protein, 10 aa, Artificial Sequence
  source: /note="Description of Artificial Sequence: Synthetic peptide"
FGQGTKVEIK

SEQ ID NO: 6097 - protein, 22 aa, Artificial Sequence
  source: /note="Description of Artificial Sequence: Synthetic peptide"
QYVLTQPPSASGTPGQRVTISC

SEQ ID NO: 6098 - protein, 15 aa, Artificial Sequence
  source: /note="Description of Artificial Sequence: Synthetic peptide"
WYQQLPGTAPKMLIY

SEQ ID NO: 6099 - protein, 32 aa, Artificial Sequence; identical to SEQ ID NO: 6083
  source: /note="Description of Artificial Sequence: Synthetic polypeptide"

SEQ ID NO: 6100 - protein, 10 aa, Artificial Sequence
  source: /note="Description of Artificial Sequence: Synthetic peptide"
FGEGTELTVL

SEQ ID NO: 6101 - protein, 22 aa, Artificial Sequence
  source: /note="Description of Artificial Sequence: Synthetic peptide"
QYVLTQPPSASGTPGQRVTISC

SEQ ID NO: 6102 - protein, 15 aa, Artificial Sequence
  source: /note="Description of Artificial Sequence: Synthetic peptide"
WYQQLPGTAPKMLIY

SEQ ID NO: 6103 - protein, 32 aa, Artificial Sequence; identical to SEQ ID NO: 6087
  source: /note="Description of Artificial Sequence: Synthetic polypeptide"

SEQ ID NO: 6104 - protein, 10 aa, Artificial Sequence
  source: /note="Description of Artificial Sequence: Synthetic peptide"
FGEGTELTVL

SEQ ID NO: 6105 - protein, 22 aa, Artificial Sequence
  source: /note="Description of Artificial Sequence: Synthetic peptide"
SYELTQPPSVSVSPGQTASITC

SEQ ID NO: 6106 - protein, 15 aa, Artificial Sequence
  source: /note="Description of Artificial Sequence: Synthetic peptide"
WYQQKPGQSPVMVIY

SEQ ID NO: 6107 - protein, 32 aa, Artificial Sequence
  source: /note="Description of Artificial Sequence: Synthetic polypeptide"
GIPERFSGSNSGNTATLTISGTQAMDEADYYC

SEQ ID NO: 6108 - protein, 10 aa, Artificial Sequence
  source: /note="Description of Artificial Sequence: Synthetic peptide"
FGEGTELTVL

SEQ ID NO: 6109 - protein, 23 aa, Artificial Sequence
  source: /note="Description of Artificial Sequence: Synthetic peptide"
DYVLTQSPLSLPVTPGEPASISC

SEQ ID NO: 6110 - protein, 15 aa, Artificial Sequence
  source: /note="Description of Artificial Sequence: Synthetic peptide"
WYLQKPGQSPQMLIY

SEQ ID NO: 6111 - protein, 32 aa, Artificial Sequence
  source: /note="Description of Artificial Sequence: Synthetic polypeptide"
GVPDRFSGSNSGNDATLKISRVEAEDVGVYYC

SEQ ID NO: 6112 - protein, 10 aa, Artificial Sequence
  source: /note="Description of Artificial Sequence: Synthetic peptide"
FGQGTKVEIK

SEQ ID NO: 6113 - protein, 23 aa, Artificial Sequence
  source: /note="Description of Artificial Sequence: Synthetic peptide"
AYQLTQSPSSLSASVGDRVTITC

SEQ ID NO: 6114 - protein, 15 aa, Artificial Sequence
  source: /note="Description of Artificial Sequence: Synthetic peptide"
WYQQKPGKAPKMLIY

SEQ ID NO: 6115 - protein, 32 aa, Artificial Sequence
  source: /note="Description of Artificial Sequence: Synthetic polypeptide"
GVPSRFSGSNSGNDATLTISSLQPEDFATYYC

SEQ ID NO: 6116 - protein, 10 aa, Artificial Sequence
  source: /note="Description of Artificial Sequence: Synthetic peptide"
FGQGTKVEIK

SEQ ID NO: 6117 - protein, 23 aa, Artificial Sequence
  source: /note="Description of Artificial Sequence: Synthetic peptide"
EYVLTQSPATLSVSPGERATLSC

SEQ ID NO: 6118 - protein, 15 aa, Artificial Sequence
  source: /note="Description of Artificial Sequence: Synthetic peptide"
WYQQKPGQAPRMLIY

SEQ ID NO: 6119 - protein, 32 aa, Artificial Sequence
  source: /note="Description of Artificial Sequence: Synthetic polypeptide"
GIPARFSGSNSGNEATLTISSLQSEDFAVYYC

SEQ ID NO: 6120 - protein, 10 aa, Artificial Sequence
  source: /note="Description of Artificial Sequence: Synthetic peptide"
FGQGTKVEIK

SEQ ID NO: 6121 - protein, 118 aa, Artificial Sequence
  source: /note="Description of Artificial Sequence: Synthetic polypeptide"
QIQLQESGPGLVKPSQSLSLTCSVTGFSINTGGYHWNWIRQFPGKKLEWMGYIYSSGSTSYNPSLKSRISITRDTSKNQFFLQLNSVTTEDTATYYCARGNWHYFDFWGQGTMVTVSS

SEQ ID NO: 6122 - protein, 118 aa, Artificial Sequence
  source: /note="Description of Artificial Sequence: Synthetic polypeptide"
QIQLQESGPGLVKPSQSLSLTCSVTGFSINTGGYHWNWIRQFPGKKLEWMGYIYSSGTTRYNPSLKSRISITRDTSKNQFFLQLNSVTPEDTATYYCTRGNWHYFDYWGQGTLVAVSS

SEQ ID NO: 6123 - protein, 118 aa, Artificial Sequence
  source: /note="Description of Artificial Sequence: Synthetic polypeptide"
QIQLQESGPGLVKPSETLSLTCTVSGFSINTGGYHWNWIRQPAGKGLEWIGYIYSSGSTSYNPSLKSRVTMSRDTSKNQFSLKLSSVTAADTAVYYCARGNWHYFDFWGQGTMVTVSS

SEQ ID NO: 6124 - protein, 118 aa, Artificial Sequence
  source: /note="Description of Artificial Sequence: Synthetic polypeptide"
QIQLQESGPGLVKPSQTLSLTCTVSGFSINTGGYHWNWIRQHPGKGLEWIGYIYSSGSTSYNPSLKSLVTISRDTSKNQFSLKLSSVTAADTAVYYCARGNWHYFDFWGQGTMVTVSS

SEQ ID NO: 6125 - protein, 118 aa, Artificial Sequence
  source: /note="Description of Artificial Sequence: Synthetic polypeptide"
EIQLLESGGGLVQPGGSLRLSCAVSGFSINTGGYHWNWVRQAPGKGLEWVGYIYSSGSTSYNPSLKSRFTISRDTSKNTFYLQMNSLRAEDTAVYYCARGNWHYFDFWGQGTMVTVSS

SEQ ID NO: 6126 - protein, 118 aa, Artificial Sequence
  source: /note="Description of Artificial Sequence: Synthetic polypeptide"
QIQLVQSGAEVKKPGSSVKVSCKVSGFSINTGGYHWNWVRQAPGQGLEWMGYIYSSGSTSYNPSLKSRVTITRDTSTNTFYMELSSLRSEDTAVYYCARGNWHYFDFWGQGTMVTVSS

SEQ ID NO: 6127 - protein, 118 aa, Artificial Sequence
  source: /note="Description of Artificial Sequence: Synthetic polypeptide"
EIQLVESGGGLVQPGGSLRLSCAVSGFSINTGGYHWNWVRQAPGKGLEWVGYIYSSGSTSYNPSLKSRFTISRDTAKNSFYLQMNSLRAEDTAVYYCARGNWHYFDFWGQGTMVTVSS

SEQ ID NO: 6128 - protein, 118 aa, Artificial Sequence
  source: /note="Description of Artificial Sequence: Synthetic polypeptide"
QIQLVQSGAEVKKPGASVKVSCKVSGFSINTGGYHWNWVRQAPGQGLEWMGYIYSSGSTSYNPSLKSRVTMTRDTSTNTFYMELSSLRSEDTAVYYCARGNWHYFDFWGQGTMVTVSS

SEQ ID NO: 6129 - protein, 118 aa, Artificial Sequence
  source: /note="Description of Artificial Sequence: Synthetic polypeptide"
QIQLQESGPGLVKPSQTLSLTCTVSGFSINTGGYHWNWIRQHPGKGLEWIGYIYSSGTTRYNPSLKSLVTISRDTSKNQFSLKLSSVTAADTAVYYCARGNWHYFDYWGQGTLVTVSS

SEQ ID NO: 6130 - protein, 118 aa, Artificial Sequence
  source: /note="Description of Artificial Sequence: Synthetic polypeptide"
QIQLQESGPGLVKPSETLSLTCTVSGFSINTGGYHWNWIRQPAGKGLEWIGYIYSSGTTRYNPSLKSRVTMSRDTSKNQFSLKLSSVTAADTAVYYCARGNWHYFDYWGQGTLVTVSS

SEQ ID NO: 6131 - protein, 118 aa, Artificial Sequence
  source: /note="Description of Artificial Sequence: Synthetic polypeptide"
EIQLLESGGGLVQPGGSLRLSCAVSGFSINTGGYHWNWVRQAPGKGLEWVGYIYSSGTTRYNPSLKSRFTISRDTSKNTFYLQMNSLRAEDTAVYYCARGNWHYFDYWGQGTLVTVSS

SEQ ID NO: 6132 - protein, 118 aa, Artificial Sequence
  source: /note="Description of Artificial Sequence: Synthetic polypeptide"
QIQLVESGGGLVKPGGSLRLSCAVSGFSINTGGYHWNWIRQAPGKGLEWVGYIYSSGTTRYNPSLKSRFTISRDTAKNSFYLQMNSLRAEDTAVYYCARGNWHYFDYWGQGTLVTVSS

SEQ ID NO: 6133 - protein, 118 aa, Artificial Sequence
  source: /note="Description of Artificial Sequence: Synthetic polypeptide"
QIQLVQSGAEVKKPGASVKVSCKVSGFSINTGGYHWNWVRQAPGQGLEWMGYIYSSGTTRYNPSLKSRVTMTRDTSTNTFYMELSSLRSEDTAVYYCARGNWHYFDYWGQGTLVTVSS

SEQ ID NO: 6134 - protein, 118 aa, Artificial Sequence
  source: /note="Description of Artificial Sequence: Synthetic polypeptide"
EIQLVQSGAEVKKPGATVKISCKVSGFSINTGGYHWNWVQQAPGKGLEWMGYIYSSGTTRYNPSLKSRVTITRDTSTNTFYMELSSLRSEDTAVYYCARGNWHYFDYWGQGTLVTVSS

SEQ ID NO: 6135 - protein, 97 aa, Artificial Sequence
  source: /note="Description of Artificial Sequence: Synthetic polypeptide"
SYTLTQPPLLSVALGHKATITCSGERLSDKYVHWYQQKPGRAPVMVIYENDKRPSGIPDQFSGSNSGNIATLTISKAQAGYEADYYCFGSGTQLTVL

SEQ ID NO: 6136 - protein, 107 aa, Artificial Sequence
  source: /note="Description of Artificial Sequence: Synthetic polypeptide"
SYTLTQPPSLSVAPGQKATIICSGENLSDKYVHWYQQKPGRAPVMVIYENEKRPSGIPDQFSGSNSGNIATLTISKAQPGSEADYYCHYWESINSVVFGSGTHLTVL

SEQ ID NO: 6137 - protein, 107 aa, Artificial Sequence
  source: /note="Description of Artificial Sequence: Synthetic polypeptide"
QSVTTQPPSVSGAPGQRVTISCSGERLSDKYVHWYQQLPGTAPKMLIYENDKRPSGVPDRFSGSNSGNSASLAITGLQAEDEADYYCQSWDSTNSAVFGGGTQLTVL

SEQ ID NO: 6138 - protein, 107 aa, Artificial Sequence
  source: /note="Description of Artificial Sequence: Synthetic polypeptide"
QSVTTQPPSASGTPGQRVTISCSGERLSDKYVHWYQQLPGTAPKMLIYENDKRPSGVPDRFSGSNSGNSASLAISGLQSEDEADYYCQSWDSTNSAVFGGGTQLTVL

SEQ ID NO: 6139 - protein, 107 aa, Artificial Sequence
  source: /note="Description of Artificial Sequence: Synthetic polypeptide"
QSVTTQPPSASGTPGQRVTISCSGERLSDKYVHWYQQLPGTAPKMLIYENDKRPSGVPDRFSGSNSGNSASLAISGLRSEDEADYYCQSWDSTNSAVFGGGTQLTVL

SEQ ID NO: 6140 - protein, 107 aa, Artificial Sequence
  source: /note="Description of Artificial Sequence: Synthetic polypeptide"
SSETTQPHSVSVATAQMARITCSGERLSDKYVHWYQQKPGQDPVMVIYENDKRPSGIPERFSGSNPGNTATLTISRIEAGDEADYYCQSWDSTNSAVFGGGTQLTVL

SEQ ID NO: 6141 - protein, 108 aa, Artificial Sequence
  source: /note="Description of Artificial Sequence: Synthetic polypeptide"
DIQMTQSPSTLSASVGDRVTITCSGERLSDKYVHWYQQKPGKAPKMLIYENDKRPSGVPSRFSGSNSGNEATLTISSLQPDDFATYYCQSWDSTNSAVFGQGTKVEIK

SEQ ID NO: 6142 - protein, 107 aa, Artificial Sequence
  source: /note="Description of Artificial Sequence: Synthetic polypeptide"
QYVLTQPPSASGTPGQRVTISCSGENLSDKYVHWYQQLPGTAPKMLIYENEKRPSGVPDRFSGSNSGNSASLAISGLQSEDEADYYCHYWESINSVVFGEGTELTVL

SEQ ID NO: 6143 - protein, 107 aa, Artificial Sequence
  source: /note="Description of Artificial Sequence: Synthetic polypeptide"
QYVLTQPPSASGTPGQRVTISCSGENLSDKYVHWYQQLPGTAPKMLIYENEKRPSGVPDRFSGSNSGNSASLAISGLRSEDEADYYCHYWESINSVVFGEGTELTVL

SEQ ID NO: 6144 - protein, 107 aa, Artificial Sequence
  source: /note="Description of Artificial Sequence: Synthetic polypeptide"
SYELTQPPSVSVSPGQTASITCSGENLSDKYVHWYQQKPGQSPVMVIYENEKRPSGIPERFSGSNSGNTATLTISGTQAMDEADYYCHYWESINSVVFGEGTELTVL

SEQ ID NO: 6145 - protein, 108 aa, Artificial Sequence
  source: /note="Description of Artificial Sequence: Synthetic polypeptide"
DYVLTQSPLSLPVTPGEPASISCSGENLSDKYVHWYLQKPGQSPQMLIYENEKRPSGVPDRFSGSNSGNDATLKISRVEAEDVGVYYCHYWESINSVVFGQGTKVEIK

SEQ ID NO: 6146 - protein, 108 aa, Artificial Sequence
  source: /note="Description of Artificial Sequence: Synthetic polypeptide"
AYQLTQSPSSLSASVGDRVTITCSGENLSDKYVHWYQQKPGKAPKMLIYENEKRPSGVPSRFSGSNSGNDATLTISSLQPEDFATYYCHYWESINSVVFGQGTKVEIK

SEQ ID NO: 6147 - protein, 108 aa, Artificial Sequence
  source: /note="Description of Artificial Sequence: Synthetic polypeptide"
EYVLTQSPATLSVSPGERATLSCSGENLSDKYVHWYQQKPGQAPRMLIYENEKRPSGIPARFSGSNSGNEATLTISSLQSEDFAVYYCHYWESINSVVFGQGTKVEIK

SEQ ID NO: 6148 - protein, 448 aa, Artificial Sequence
  source: /note="Description of Artificial Sequence: Synthetic polypeptide"
QIQLQESGPGLVKPSQSLSLTCSVTGFSINTGGYHWNWIRQFPGKKLEWMGYIYSSGSTSYNPSLKSRISITRDTSKNQFFLQLNSVTTEDTATYYCARGNWHYFDFWGQGTMVTVSSASTKGPSVFPLAPSSKSTSGGTAALGCLVKDYFPEPVTVSWNSGALTSGVHTFPAVLQSSGLYSLSSVVTVPSSSLGTQTYICNVNHKPSNTKVDKRVEPKSCDKTHTCPPCPAPELLGGPSVFLFPPKPKDTLMISRTPEVTCVVVDVSHEDPEVKFNWYVDGVEVHNAKTKPREEQYASTYRVVSVLTVLHQDWLNGKEYKCKVSNKALPAPIEKTISKAKGQPREPQVCTLPPSREEMTKNQVSLSCAVKGFYPSDIAVEWESNGQPENNYKTTPPVLDSDGSFFLVSKLTVDKSRWQQGNVFSCSVMHEALHNHYTQKSLSLSPGK

SEQ ID NO: 6149 - protein, 448 aa, Artificial Sequence
  source: /note="Description of Artificial Sequence: Synthetic polypeptide"
QIQLQESGPGLVKPSQSLSLTCSVTGFSINTGGYHWNWIRQFPGKKLEWMGYIYSSGSTSYNPSLKSRISITRDTSKNQFFLQLNSVTTEDTATYYCARGNWHYFDFWGQGTMVTVSSASTKGPSVFPLAPSSKSTSGGTAALGCLVKDYFPEPVTVSWNSGALTSGVHTFPAVLQSSGLYSLSSVVTVPSSSLGTQTYICNVNHKPSNTKVDKRVEPKSCDKTHTCPPCPAPELLGGPSVFLFPPKPKDTLMISRTPEVTCVVVDVSHEDPEVKFNWYVDGVEVHNAKTKPREEQYNSTYRVVSVLTVLHQDWLNGKEYKCKVSNKALPAPIEKTISKAKGQPREPQVCTLPPSREEMTKNQVSLSCAVKGFYPSDIAVEWESNGQPENNYKTTPPVLDSDGSFFLVSKLTVDKSRWQQGNVFSCSVMHEALHNHYTQKSLSLSPGK

SEQ ID NO: 6150 - protein, 213 aa, Artificial Sequence
  source: /note="Description of Artificial Sequence: Synthetic polypeptide"
SYTLTQPPLLSVALGHKATITCSGERLSDKYVHWYQQKPGRAPVMVIYENDKRPSGIPDQFSGSNSGNIATLTISKAQAGYEADYYCQSWDSTNSAVFGSGTQLTVLGQPKANPTVTLFPPSSEELQANKATLVCLISDFYPGAVTVAWKADGSPVKAGVETTKPSKQSNNKYAASSYLSLTPEQWKSHRSYSCQVTHEGSTVEKTVAPTECS

SEQ ID NO: 6151 - protein, 448 aa, Artificial Sequence
  source: /note="Description of Artificial Sequence: Synthetic polypeptide"
QIQLQESGPGLVKPSQSLSLTCSVTGFSINTGGYHWNWIRQFPGKKLEWMGYIYSSGTTRYNPSLKSRISITRDTSKNQFFLQLNSVTPEDTATYYCTRGNWHYFDYWGQGTLVAVSSASTKGPSVFPLAPSSKSTSGGTAALGCLVKDYFPEPVTVSWNSGALTSGVHTFPAVLQSSGLYSLSSVVTVPSSSLGTQTYICNVNHKPSNTKVDKRVEPKSCDKTHTCPPCPAPELLGGPSVFLFPPKPKDTLMISRTPEVTCVVVDVSHEDPEVKFNWYVDGVEVHNAKTKPREEQYASTYRVVSVLTVLHQDWLNGKEYKCKVSNKALPAPIEKTISKAKGQPREPQVCTLPPSREEMTKNQVSLSCAVKGFYPSDIAVEWESNGQPENNYKTTPPVLDSDGSFFLVSKLTVDKSRWQQGNVFSCSVMHEALHNHYTQKSLSLSPGK

SEQ ID NO: 6152 - protein, 448 aa, Artificial Sequence
  source: /note="Description of Artificial Sequence: Synthetic polypeptide"
QIQLQESGPGLVKPSQSLSLTCSVTGFSINTGGYHWNWIRQFPGKKLEWMGYIYSSGTTRYNPSLKSRISITRDTSKNQFFLQLNSVTPEDTATYYCTRGNWHYFDYWGQGTLVAVSSASTKGPSVFPLAPSSKSTSGGTAALGCLVKDYFPEPVTVSWNSGALTSGVHTFPAVLQSSGLYSLSSVVTVPSSSLGTQTYICNVNHKPSNTKVDKRVEPKSCDKTHTCPPCPAPELLGGPSVFLFPPKPKDTLMISRTPEVTCVVVDVSHEDPEVKFNWYVDGVEVHNAKTKPREEQYNSTYRVVSVLTVLHQDWLNGKEYKCKVSNKALPAPIEKTISKAKGQPREPQVCTLPPSREEMTKNQVSLSCAVKGFYPSDIAVEWESNGQPENNYKTTPPVLDSDGSFFLVSKLTVDKSRWQQGNVFSCSVMHEALHNHYTQKSLSLSPGK

SEQ ID NO: 6153 - protein, 213 aa, Artificial Sequence
  source: /note="Description of Artificial Sequence: Synthetic polypeptide"
SYTLTQPPSLSVAPGQKATIICSGENLSDKYVHWYQQKPGRAPVMVIYENEKRPSGIPDQFSGSNSGNIATLTISKAQPGSEADYYCHYWESINSVVFGSGTHLTVLGQPKANPTVTLFPPSSEELQANKATLVCLISDFYPGAVTVAWKADGSPVKAGVETTKPSKQSNNKYAASSYLSLTPEQWKSHRSYSCQVTHEGSTVEKTVAPTECS

SEQ ID NO: 6154-6156 - skipped (3 entries)

SEQ ID NO: 6157 - protein, 440 aa, Artificial Sequence
  source: /note="Description of Artificial Sequence: Synthetic polypeptide"
METDTLLLWVLLLWVPGSTGDYKDDDDKGGGGSGTGGAAAHITGTRGRSNTLSSPNSKNEKALGRKINSWESSRSGHSFLSNLHLRNGELVIHEKGFYYIYSQTYFRFQEEIKENTKNDKQMVQYIYKYTSYPDPILLMKSARNSCWSKDAEYGLYSIYQGGIFELKENDRIFVSVTNEHLIDMDHEASFFGAFAVSGSGNGTSNGTSGSSGGDKTHTCPPCPAPELLGGPSVFLFPPKPKDTLMISRTPEVTCVVVDVSHEDPEVKFNWYVDGVEVHNAKTKPREEQYNSTYRVVSVLTVLHQDWLNGKEYKCKVSNKALPAPIEKTISKAKGQPREPQVYTLPPCREEMTKNQVSLWCLVKGFYPSDIAVEWESNGQPENNYKTTPPVLDSDGSFFLYSKLTVDKSRWQQGNVFSCSVMHEALHNHYTQKSLSLSPGK

SEQ ID NO: 6158 - protein, 601 aa, Artificial Sequence
  source: /note="Description of Artificial Sequence: Synthetic polypeptide"
METDTLLLWVLLLWVPGSTGDYKDDDDKGGGGSGTGGAAAHITGTRGRSNTLSSPNSKNEKALGRKINSWESSRSGHSFLSNLHLRNGELVIHEKGFYYIYSQTYFRFQEEIKENTKNDKQMVQYIYKYTSYPDPILLMKSARNSCWSKDAEYGLYSIYQGGIFELKENDRIFVSVTNEHLIDMDHEASFFGAFAVSGAAAHITGTRGRSNTLSSPNSKNEKALGRKINSWESSRSGHSFLSNLHLRNGELVIHEKGFYYIYSQTYFRFQEEIKENTKNDKQMVQYIYKYTSYPDPILLMKSARNSCWSKDAEYGLYSIYQGGIFELKENDRIFVSVTNEHLIDMDHEASFFGAFAVSGSGNGTSNGTSGSSGGDKTHTCPPCPAPELLGGPSVFLFPPKPKDTLMISRTPEVTCVVVDVSHEDPEVKFNWYVDGVEVHNAKTKPREEQYNSTYRVVSVLTVLHQDWLNGKEYKCKVSNKALPAPIEKTISKAKGQPREPQVYTLPPCREEMTKNQVSLWCLVKGFYPSDIAVEWESNGQPENNYKTTPPVLDSDGSFFLYSKLTVDKSRWQQGNVFSCSVMHEALHNHYTQKSLSLSPGK

SEQ ID NO: 6159 - protein, 762 aa, Artificial Sequence
  source: /note="Description of Artificial Sequence: Synthetic polypeptide"
METDTLLLWVLLLWVPGSTGDYKDDDDKGGGGSGTGGAAAHITGTRGRSNTLSSPNSKNEKALGRKINSWESSRSGHSFLSNLHLRNGELVIHEKGFYYIYSQTYFRFQEEIKENTKNDKQMVQYIYKYTSYPDPILLMKSARNSCWSKDAEYGLYSIYQGGIFELKENDRIFVSVTNEHLIDMDHEASFFGAFAVSGAAAHITGTRGRSNTLSSPNSKNEKALGRKINSWESSRSGHSFLSNLHLRNGELVIHEKGFYYIYSQTYFRFQEEIKENTKNDKQMVQYIYKYTSYPDPILLMKSARNSCWSKDAEYGLYSIYQGGIFELKENDRIFVSVTNEHLIDMDHEASFFGAFAVSGAAAHITGTRGRSNTLSSPNSKNEKALGRKINSWESSRSGHSFLSNLHLRNGELVIHEKGFYYIYSQTYFRFQEEIKENTKNDKQMVQYIYKYTSYPDPILLMKSARNSCWSKDAEYGLYSIYQGGIFELKENDRIFVSVTNEHLIDMDHEASFFGAFAVSGSGNGTSNGTSGSSGGDKTHTCPPCPAPELLGGPSVFLFPPKPKDTLMISRTPEVTCVVVDVSHEDPEVKFNWYVDGVEVHNAKTKPREEQYNSTYRVVSVLTVLHQDWLNGKEYKCKVSNKALPAPIEKTISKAKGQPREPQVYTLPPCREEMTKNQVSLWCLVKGFYPSDIAVEWESNGQPENNYKTTPPVLDSDGSFFLYSKLTVDKSRWQQGNVFSCSVMHEALHNHYTQKSLSLSPGK

SEQ ID NO: 6160 - protein, 444 aa, Artificial Sequence
  source: /note="Description of Artificial Sequence: Synthetic polypeptide"
METDTLLLWVLLLWVPGSTGTSEETISTVQEKQQNISPLVRERGPQRVAAHITGTRGRSNTLSSPNSKNEKALGRKINSWESSRSGHSFLSNLHLRNGELVIHEKGFYYIYSQTYFRFQEEIKENTKNDKQMVQYIYKYTSYPDPILLMKSARNSCWSKDAEYGLYSIYQGGIFELKENDRIFVSVTNEHLIDMDHEASFFGAFLVGGGGGSGGGGSDKTHTCPPCPAPELLGGPSVFLFPPKPKDTLMISRTPEVTCVVVDVSHEDPEVKFNWYVDGVEVHNAKTKPREEQYNSTYRVVSVLTVLHQDWLNGKEYKCKVSNKALPAPIEKTISKAKGQPREPQVYTLPPCREEMTKNQVSLWCLVKGFYPSDIAVEWESNGQPENNYKTTPPVLDSDGSFFLYSKLTVDKSRWQQGNVFSCSVMHEALHNHYTQKSLSLSPGK

SEQ ID NO: 6161 - protein, 642 aa, Artificial Sequence
  source: /note="Description of Artificial Sequence: Synthetic polypeptide"
METDTLLLWVLLLWVPGSTGTSEETISTVQEKQQNISPLVRERGPQRVAAHITGTRGRSNTLSSPNSKNEKALGRKINSWESSRSGHSFLSNLHLRNGELVIHEKGFYYIYSQTYFRFQEEIKENTKNDKQMVQYIYKYTSYPDPILLMKSARNSCWSKDAEYGLYSIYQGGIFELKENDRIFVSVTNEHLIDMDHEASFFGAFLVGGGGGSGGGGSGTSEETISTVQEKQQNISPLVRERGPQRVAAHITGTRGRSNTLSSPNSKNEKALGRKINSWESSRSGHSFLSNLHLRNGELVIHEKGFYYIYSQTYFRFQEEIKENTKNDKQMVQYIYKYTSYPDPILLMKSARNSCWSKDAEYGLYSIYQGGIFELKENDRIFVSVTNEHLIDMDHEASFFGAFLVGGGGGSGGGGSDKTHTCPPCPAPELLGGPSVFLFPPKPKDTLMISRTPEVTCVVVDVSHEDPEVKFNWYVDGVEVHNAKTKPREEQYNSTYRVVSVLTVLHQDWLNGKEYKCKVSNKALPAPIEKTISKAKGQPREPQVYTLPPCREEMTKNQVSLWCLVKGFYPSDIAVEWESNGQPENNYKTTPPVLDSDGSFFLYSKLTVDKSRWQQGNVFSCSVMHEALHNHYTQKSLSLSPGK

SEQ ID NO: 6162 - protein, 840 aa, Artificial Sequence
  source: /note="Description of Artificial Sequence: Synthetic polypeptide"
METDTLLLWVLLLWVPGSTGTSEETISTVQEKQQNISPLVRERGPQRVAAHITGTRGRSNTLSSPNSKNEKALGRKINSWESSRSGHSFLSNLHLRNGELVIHEKGFYYIYSQTYFRFQEEIKENTKNDKQMVQYIYKYTSYPDPILLMKSARNSCWSKDAEYGLYSIYQGGIFELKENDRIFVSVTNEHLIDMDHEASFFGAFLVGGGGGSGGGGSGTSEETISTVQEKQQNISPLVRERGPQRVAAHITGTRGRSNTLSSPNSKNEKALGRKINSWESSRSGHSFLSNLHLRNGELVIHEKGFYYIYSQTYFRFQEEIKENTKNDKQMVQYIYKYTSYPDPILLMKSARNSCWSKDAEYGLYSIYQGGIFELKENDRIFVSVTNEHLIDMDHEASFFGAFLVGGGGGSGGGGSGTSEETISTVQEKQQNISPLVRERGPQRVAAHITGTRGRSNTLSSPNSKNEKALGRKINSWESSRSGHSFLSNLHLRNGELVIHEKGFYYIYSQTYFRFQEEIKENTKNDKQMVQYIYKYTSYPDPILLMKSARNSCWSKDAEYGLYSIYQGGIFELKENDRIFVSVTNEHLIDMDHEASFFGAFLVGGGGGSGGGGSDKTHTCPPCPAPELLGGPSVFLFPPKPKDTLMISRTPEVTCVVVDVSHEDPEVKFNWYVDGVEVHNAKTKPREEQYNSTYRVVSVLTVLHQDWLNGKEYKCKVSNKALPAPIEKTISKAKGQPREPQVYTLPPCREEMTKNQVSLWCLVKGFYPSDIAVEWESNGQPENNYKTTPPVLDSDGSFFLYSKLTVDKSRWQQGNVFSCSVMHEALHNHYTQKSLSLSPGK

SEQ ID NO: 6163 - protein, 502 aa, Artificial Sequence
  source: /note="Description of Artificial Sequence: Synthetic polypeptide"
METDTLLLWVLLLWVPGSTGEVQLVESGGGLVQPGGSLRLSCAASGFTFSSYVMSWVRQAPGKGLEWVATISSGGSYTYYPDSVKGRFTISRDNAKNTLYLQMNSLRAEDTAVYYCARRGDSMITTDYWGQGTLVTVSSGGGGSGGGGSGGGGSGGGGSDIQMTQSPSSLSASVGDRVTITCKASQDVGTAVAWYQQKPGKAPKLLIYWASTRHTGVPSRFSGSGSGTDFTLTISSLQPEDFATYYCQQYSSYRTFGQGTKVEIKGGGGSGGGGSDKTHTCPPCPAPELLGGPSVFLFPPKPKDTLMISRTPEVTCVVVDVSHEDPEVKFNWYVDGVEVHNAKTKPREEQYNSTYRVVSVLTVLHQDWLNGKEYKCKVSNKALPAPIEKTISKAKGQPREPQVYTLPPCREEMTKNQVSLWCLVKGFYPSDIAVEWESNGQPENNYKTTPPVLDSDGSFFLYSKLTVDKSRWQQGNVFSCSVMHEALHNHYTQKSLSLSPGK

SEQ ID NO: 6164 - protein, 505 aa, Artificial Sequence
  source: /note="Description of Artificial Sequence: Synthetic polypeptide"
METDTLLLWVLLLWVPGSTGEVQLVQSGGGVERPGGSLRLSCAASGFTFDDYAMSWVRQAPGKGLEWVSGINWQGGSTGYADSVKGRVTISRDNAKNSLYLQMNSLRAEDTAVYYCAKILGAGRGWYFDYWGKGTTVTVSSGGGGSGGGGSGGGGSGGGGSSELTQDPAVSVALGQTVRITCSGDSLRSYYASWYQQKPGQAPVLVIYGANNRPSGIPDRFSGSSSGNTASLTITGAQAEDEADYYCNSADSSGNHVVFGGGTKLTVLGGGGSGGGGSDKTHTCPPCPAPELLGGPSVFLFPPKPKDTLMISRTPEVTCVVVDVSHEDPEVKFNWYVDGVEVHNAKTKPREEQYNSTYRVVSVLTVLHQDWLNGKEYKCKVSNKALPAPIEKTISKAKGQPREPQVYTLPPCREEMTKNQVSLWCLVKGFYPSDIAVEWESNGQPENNYKTTPPVLDSDGSFFLYSKLTVDKSRWQQGNVFSCSVMHEALHNHYTQKSLSLSPGK

SEQ ID NO: 6165 - protein, 508 aa, Artificial Sequence
  source: /note="Description of Artificial Sequence: Synthetic polypeptide"
METDTLLLWVLLLWVPGSTGQVQLQESGPGLVKPSQTLSLTCTVSGGSISSGDYFWSWIRQLPGKGLEWIGHIHNSGTTYYNPSLKSRVTISVDTSKKQFSLRLSSVTAADTAVYYCARDRGGDYYYGMDVWGQGTTVTVSSGGGGSGGGGSGGGGSGGGGSEIVLTQSPGTLSLSPGERATLSCRASQGISRSYLAWYQQKPGQAPSLLIYGASSRATGIPDRFSGSGSGTDFTLTISRLEPEDFAVYYCQQFGSSPWTFGQGTKVEIKRGGGGSGGGGSDKTHTCPPCPAPELLGGPSVFLFPPKPKDTLMISRTPEVTCVVVDVSHEDPEVKFNWYVDGVEVHNAKTKPREEQYNSTYRVVSVLTVLHQDWLNGKEYKCKVSNKALPAPIEKTISKAKGQPREPQVYTLPPCREEMTKNQVSLWCLVKGFYPSDIAVEWESNGQPENNYKTTPPVLDSDGSFFLYSKLTVDKSRWQQGNVFSCSVMHEALHNHYTQKSLSLSPGK

SEQ ID NO: 6166-6174 - skipped (9 entries)

SEQ ID NO: 6175 - protein, 243 aa, Artificial Sequence
  source: /note="Description of Artificial Sequence: Synthetic polypeptide"
QVHLQESGPGLVKPSETLSLTCTVSDDSISSYYWSWIRQPPGKGLEWIGHISYSGSANYNPSLKSRVTISVDTSKNQFSLKLSSVTAADTAVYYCANWDDAFNIWGQGTMVTVSSGGGGSGGGGSGGGGSGGGGSEIVLTQSPGTLSLSPGERATLSCRASQSVSSSYLAWYQQKPGQAPRLLIYGASSRATGIPDRFSGSGSGTDFTLTISRLEPEDFAVYYCQQYGSSPWTFGQGTKVEIK

SEQ ID NO: 6176 - protein, 115 aa, Artificial Sequence
  source: /note="Description of Artificial Sequence: Synthetic polypeptide"
QVHLQESGPGLVKPSETLSLTCTVSDDSISSYYWSWIRQPPGKGLEWIGHISYSGSANYNPSLKSRVTISVDTSKNQFSLKLSSVTAADTAVYYCANWDDAFNIWGQGTMVTVSS

SEQ ID NO: 6177 - protein, 108 aa, Artificial Sequence
  source: /note="Description of Artificial Sequence: Synthetic polypeptide"
EIVLTQSPGTLSLSPGERATLSCRASQSVSSSYLAWYQQKPGQAPRLLIYGASSRATGIPDRFSGSGSGTDFTLTISRLEPEDFAVYYCQQYGSSPWTFGQGTKVEIK

SEQ ID NO: 6178 - protein, 250 aa, Artificial Sequence
  source: /note="Description of Artificial Sequence: Synthetic polypeptide"
EVQLVQSGAEVKEPGESLKISCKNSGYSFTNYWVGWVRQMPGKGLEWMGIIYPGDSDTRYSPSFQGQVTISADKSINTAYLQWSSLKASDTAMYYCGRLTMFRGIIIGYFDYWGQGTLVTVSSGGGGSGGGGSGGGGSGGGGSEIVLTQSPATLSLSPGERATLSCRASQSVSSYLAWYQQKPGQAPRLLIYDASNRATGIPARFSGSGSGTDFTLTISSLEPEDFAVYYCQQRSNWPWTFGQGTKVEIK

SEQ ID NO: 6179 - protein, 123 aa, Artificial Sequence
  source: /note="Description of Artificial Sequence: Synthetic polypeptide"
EVQLVQSGAEVKEPGESLKISCKNSGYSFTNYWVGWVRQMPGKGLEWMGIIYPGDSDTRYSPSFQGQVTISADKSINTAYLQWSSLKASDTAMYYCGRLTMFRGIIIGYFDYWGQGTLVTVSS

SEQ ID NO: 6180 - protein, 107 aa, Artificial Sequence
  source: /note="Description of Artificial Sequence: Synthetic polypeptide"
EIVLTQSPATLSLSPGERATLSCRASQSVSSYLAWYQQKPGQAPRLLIYDASNRATGIPARFSGSGSGTDFTLTISSLEPEDFAVYYCQQRSNWPWTFGQGTKVEIK

SEQ ID NO: 6181 - protein, 247 aa, Artificial Sequence
  source: /note="Description of Artificial Sequence: Synthetic polypeptide"
QVQLQQSGPELVKPGASVKMSCKASGYTFTDYVINWGKQRSGQGLEWIGEIYPGSGTNYYNEKFKAKATLTADKSSNIAYMQLSSLTSEDSAVYFCARRGRYGLYAMDYWGQGTSVTVSSGGGGSGGGGSGGGGSGGGGSDIQMTQTTSSLSASLGDRVTISCRASQDISNYLNWYQQKPDGTVKLLIYYTSRLHSGVPSRFSGSGSGTDYSLTINNLEQEDIATYFCQQGNTRPWTFGGGTKLEIK

SEQ ID NO: 6182 - protein, 120 aa, Artificial Sequence
  source: /note="Description of Artificial Sequence: Synthetic polypeptide"
QVQLQQSGPELVKPGASVKMSCKASGYTFTDYVINWGKQRSGQGLEWIGEIYPGSGTNYYNEKFKAKATLTADKSSNIAYMQLSSLTSEDSAVYFCARRGRYGLYAMDYWGQGTSVTVSS

SEQ ID NO: 6183 - protein, 107 aa, Artificial Sequence
  source: /note="Description of Artificial Sequence: Synthetic polypeptide"
DIQMTQTTSSLSASLGDRVTISCRASQDISNYLNWYQQKPDGTVKLLIYYTSRLHSGVPSRFSGSGSGTDYSLTINNLEQEDIATYFCQQGNTRPWTFGGGTKLEIK

SEQ ID NO: 6184 - protein, 239 aa, Artificial Sequence
  source: /note="Description of Artificial Sequence: Synthetic polypeptide"
EVQLVESGGGVVRPGGSLRLSCAASGFTFDDYGMSWVRQAPGKGLEWVSGINWNGGSTGYADSVKGRFTISRDNAKNSLYLQMNSLRAEDTAVYYCARGRSLLFDYWGQGTLVTVSRGGGGSGGGGSGGGGSSELTQDPAVSVALGQTVRITCQGDSLRSYYASWYQQKPGQAPVLVIYGKNNRPSGIPDRFSGSSSGNTASLTITGAQAEDEADYYCNSRDSSGNHVVFGGGTKLTVL

SEQ ID NO: 6185 - protein, 117 aa, Artificial Sequence
  source: /note="Description of Artificial Sequence: Synthetic polypeptide"
EVQLVESGGGVVRPGGSLRLSCAASGFTFDDYGMSWVRQAPGKGLEWVSGINWNGGSTGYADSVKGRFTISRDNAKNSLYLQMNSLRAEDTAVYYCARGRSLLFDYWGQGTLVTVSR

SEQ ID NO: 6186 - protein, 108 aa, Artificial Sequence
  source: /note="Description of Artificial Sequence: Synthetic polypeptide"
SSELTQDPAVSVALGQTVRITCQGDSLRSYYASWYQQKPGQAPVLVIYGKNNRPSGIPDRFSGSSSGNTASLTITGAQAEDEADYYCNSRDSSGNHVVFGGGTKLTVL

SEQ ID NO: 6187-7016 - skipped (830 entries)

SEQ ID NO: 7017 - protein, 114 aa, Artificial Sequence
  source: /note="Description of Artificial Sequence: Synthetic polypeptide"
NWVNVISDLKKIEDLIQSMHIDATLYTESDVHPSCKVTAMKCFLLELQVISLESGDASIHDTVENLIILANNSLSSNGNVTESGCKECEELEEKNIKEFLQSFVHIVQMFINTS

SEQ ID NO: 7018 - protein, 77 aa, Artificial Sequence
  source: /note="Description of Artificial Sequence: Synthetic polypeptide"
MAPRRARGCRTLGLPALLLLLLLRPPATRGITCPPPMSVEHADIWVKSYSLYSRERYICNSGFKRKAGTSSLTECVL

SEQ ID NO: 7019 - protein, 20 aa, Artificial Sequence
  source: /note="Description of Artificial Sequence: Synthetic peptide"
SGGSGGGGSGGGSGGGGSLQ

SEQ ID NO: 7020 - protein, 133 aa, Artificial Sequence [sequence omitted]

SEQ ID NO: 7021 - protein, 157 aa, Artificial Sequence
  source: /note="Description of Artificial Sequence: Synthetic polypeptide"
YFGKLESKLSVIRNLNDQVLFIDQGNRPLFEDMTDSDCRDNAPRTIFIISMYKDSQPRGMAVTISVKCEKISTLSCENKIISFKEMNPPDNIKDTKSDIIFFQRSVPGHDNKMQFESSSYEGYFLACEKERDLFKLILKKEDELGDRSIMFTVQNED

SEQ ID NO: 7022 - protein, 133 aa, Artificial Sequence [sequence omitted]

SEQ ID NO: 7023 - protein, 138 aa, Artificial Sequence
  source: /note="Description of Artificial Sequence: Synthetic polypeptide"
QDPYVKEAENLKKYFNAGHSDVADNGTLFLGILKNWKEESDRKIMQSQIVSFYFKLFKNFKDDQSIQKSVETIKEDMNVKFFNSNKKKRDDFEKLTNYSVTDLNVQRKAIHELIQVMAELSPAAKTGKRKRSQMLFRG

SEQ ID NO: 7024-7226 - skipped (203 entries)

SEQ ID NO: 7227 - protein, 133 aa, Artificial Sequence
  source: /note="Description of Artificial Sequence: Synthetic polypeptide"
APTSSSTKKTQLQLEHLLLDLQMILNGINNYKNPKLTRMLTFKFYMPKKATELKHLQCLEEELKPLEEVLNLAQSKNFHLRPRDLISNINVIVLELKGSETTFMCEYADETATIVEFLNRWITFAQSIISTLT

SEQ ID NO: 7228 - protein, 133 aa, Artificial Sequence
  source: /note="Description of Artificial Sequence: Synthetic polypeptide"
APASSSTKKTQLQLEHLLLDLQMILNGINNYKNPKLTRMLTAKFAMPKKATELKHLQCLEEELKPLEEVLNGAQSKNFHLRPRDLISNINVIVLELKGSETTFMCEYADETATIVEFLNRWITFAQSIISTLT

SEQ ID NO: 7229 - protein, 518 aa, Artificial Sequence
  source: /note="Description of Artificial Sequence: Synthetic polypeptide"
IWELKKDVYVVELDWYPDAPGEMVVLTCDTPEEDGITWTLDQSSEVLGSGKTLTIQVKEFGDAGQYTCHKGGEVLSHSLLLLHKKEDGIWSTDILKDQKEPKNKTFLRCEAKNYSGRFTCWWLTTISTDLTFSVKSSRGSSDPQGVTCGAATLSAERVRGDNKEYEYSVECQEDSACPAAEESLPIEVMVDAVHKLKYENYTSSFFIRDIIKPDPPKNLQLKPLKNSRQVEVSWEYPDTWSTPHSYFSLTFCVQVQGKSKREKKDRVFTDKTSATVICRKNASISVRAQDRYYSSSWSEWASVPCSGGGGSGGGGSGGGGSRNLPVATPDPGMFPCLHHSQNLLRAVSNMLQKARQTLEFYPCTSEEIDHEDITKDKTSTVEACLPLELTKNESCLNSRETSFITNGSCLASRKTSFMMALCLSSIYEDLKMYQVEFKTMNAKLLMDPKRQIFLDQNMLAVIDELMQALNFNSETVPQKSSLEEPDFYKTKIKLCILLHAFRIRAVTIDRVMSYLNAS

SEQ ID NO: 7230 - protein, 340 aa, Artificial Sequence
  source: /note="Description of Artificial Sequence: Synthetic polypeptide"
SPGQGTQSENSCTHFPGNLPNMLRDLRDAFSRVKTFFQMKDQLDNLLLKESLLEDFKGYLGCQALSEMIQFYLEEVMPQAENQDPDIKAHVNSLGENLKTLRLRLRRCHRFLPCENKSKAVEQVKNAFNKLQEKGIYKAMSEFDIFINYIEAYMTMKIRNGGGGSGGGGSGGGGSGGGGSSPGQGTQSENSCTHFPGNLPNMLRDLRDAFSRVKTFFQMKDQLDNLLLKESLLEDFKGYLGCQALSEMIQFYLEEVMPQAENQDPDIKAHVNSLGENLKTLRLRLRRCHRFLPCENKSKAVEQVKNAFNKLQEKGIYKAMSEFDIFINYIEAYMTMKIRN

SEQ ID NO: 7231 - protein, 166 aa, Artificial Sequence
  source: /note="Description of Artificial Sequence: Synthetic polypeptide"
SPGQGTQSENSCTHFPGNLPNMLRDLRDAFSRVKTFFQMKDQLDNLLLKESLLEDFKGYLGCQALSEMIQFYLEEVMPQAENQDPDIKAHVNSLGENLKTLRLRLRRCHRFLPCENGGGSGGKSKAVEQVKNAFNKLQEKGIYKAMSEFDIFINYIEAYMTMKIRN

SEQ ID NO: 7232 - protein, 114 aa, Artificial Sequence
  source: /note="Description of Artificial Sequence: Synthetic polypeptide"
NWVNVISDLKKIEDLIQSMHIDATLYTESDVHPSCKVTAMKCFLLELQVISLASGDASIHDTVENLIILANNSLSSNGAVTESGCKECEELEEKNIKEFLQSFVHIVQMFINTS

SEQ ID NO: 7233 - protein, 238 aa, Artificial Sequence
  source: /note="Description of Artificial Sequence: Synthetic polypeptide"
DLKVEMMAGGTQITPLNDNVTIFCNIFYSQPLNITSMGITWFWKSLTFDKEVKVFEFFGDHQEAFRPGAIVSPWRLKSGDASLRLPGIQLEEAGEYRCEVVVTPLKAQGTVQLEVVASPASRLLLDQVGMKENEDKYMCESSGFYPEAINITWEKQTQKFPHPIEISEDVITGPTIKNMDGTFNVTSCLKLNSSQEDPGTVYQCVVRHASLHTPLRSNFTLTAARHSLSETEKTDNFS

SEQ ID NO: 7234 - protein, 284 aa, Artificial Sequence
  source: /note="Description of Artificial Sequence: Synthetic polypeptide"
EPHSLRYNLTVLSWDGSVQSGFLTEVHLDGQPFLRCDRQKCRAKPQGQWAEDVLGNKTWDRETRDLTGNGKDLRMTLAHIKDQKEGLHSLQEIRVCEIHEDNSTRSSQHFYYDGELFLSQNLETKEWTMPQSSRAQTLAMNVRNFLKEDAMKTKTHYHAMHADCLQELRRYLKSGVVLRRTVPPMVNVTRSEASEGNITVTCRASGFYPWNITLSWRQDGVSLSHDTQQWGDVLPDGNGTYQTWVATRICQGEEQRFTCYMEHSGNHSTHPVPSGKVLVLQSHW

SEQ ID NO: 7235 - protein, 287 aa, Artificial Sequence
  source: /note="Description of Artificial Sequence: Synthetic polypeptide"
AEPHSLRYNLMVLSQDESVQSGFLAEGHLDGQPFLRYDRQKRRAKPQGQWAEDVLGAKTWDTETEDLTENGQDLRRTLTHIKDQKGGLHSLQEIRVCEIHEDSSTRGSRHFYYDGELFLSQNLETQESTVPQSSRAQTLAMNVTNFWKEDAMKTKTHYRAMQADCLQKLQRYLKSGVAIRRTVPPMVNVTCSEVSEGNITVTCRASSFYPRNITLTWRQDGVSLSHNTQQWGDVLPDGNGTYQTWVATRIRQGEEQRFTCYMEHSGNHGTHPVPSGKVLVLQSQRTD

SEQ ID NO: 7236 - protein, 191 aa, Artificial Sequence
  source: /note="Description of Artificial Sequence: Synthetic polypeptide"
GWVDTHCLCYDFIITPKSRPEPQWCEVQGLVDERPFLHYDCVNHKAKAFASLGKKVNVTKTWEEQTETLRDVVDFLKGQLLDIQVENLIPIEPLTLQARMSCEHEAHGHGRGSWQFLFNGQKFLLFDSNNRKWTALHPGAKKMTEKWEKNRDVTMFFQKISLGDCKMWLEEFLMYWEQMLDPTKPPSLAPG

SEQ ID NO: 7237 - protein, 329 aa, Artificial Sequence
  source: /note="Description of Artificial Sequence: Synthetic polypeptide"
QDVRVQVLPEVRGQLGGTVELPCHLLPPVPGLYISLVTWQRPDAPANHQNVAAFHPKMGPSFPSPKPGSERLSFVSAKQSTGQDTEAELQDATLALHGLTVEDEGNYTCEFATFPKGSVRGMTWLRVIAKPKNQAEAQKVTFSQDPTTVALCISKEGRPPARISWLSSLDWEAKETQVSGTLAGTVTVTSRFTLVPSGRADGVTVTCKVEHESFEEPALIPVTLSVRYPPEVSISGYDDNWYLGRTDATLSCDVRSNPEPTGYDWSTTSGTFPTSAVAQGSQLVIHAVDSLFNTTFVCTVTNAVGMGRAEQVIFVRETPNTAGAGATGG

SEQ ID NO: 7238 - protein, 323 aa, Artificial Sequence
  source: /note="Description of Artificial Sequence: Synthetic polypeptide"
WPPPGTGDVVVQAPTQVPGFLGDSVTLPCYLQVPNMEVTHVSQLTWARHGESGSMAVFHQTQGPSYSESKRLEFVAARLGAELRNASLRMFGLRVEDEGNYTCLFVTFPQGSRSVDIWLRVLAKPQNTAEVQKVQLTGEPVPMARCVSTGGRPPAQITWHSDLGGMPNTSQVPGFLSGTVTVTSLWILVPSSQVDGKNVTCKVEHESFEKPQLLTVNLTVYYPPEVSISGYDNNWYLGQNEATLTCDARSNPEPTGYNWSTTMGPLPPFAVAQGAQLLIRPVDKPINTTLICNVTNALGARQAELTVQVKEGPPSEHSGISRN

SEQ ID NO: 7239 - protein, 330 aa, Artificial Sequence
  source: /note="Description of Artificial Sequence: Synthetic polypeptide"
QNLFTKDVTVIEGEVATISCQVNKSDDSVIQLLNPNRQTIYFRDFRPLKDSRFQLLNFSSSELKVSLTNVSISDEGRYFCQLYTDPPQESYTTITVLVPPRNLMIDIQKDTAVEGEEIEVNCTAMASKPATTIRWFKGNTELKGKSEVEEWSDMYTVTSQLMLKVHKEDDGVPVICQVEHPAVTGNLQTQRYLEVQYKPQVHIQMTYPLQGLTREGDALELTCEAIGKPQPVMVTWVRVDDEMPQHAVLSGPNLFINNLNKTDNGTYRCEASNIVGKAHSDYMLYVYDPPTTIPPPTTTTTTTTTTTTTILTIITDSRAGEEGSIRAVDH

SEQ ID NO: 7240 - protein, 155 aa, Artificial Sequence
  source: /note="Description of Artificial Sequence: Synthetic polypeptide"
QRFAQAQQQLPLESLGWDVAELQLNHTGPQQDPRLYWQGGPALGRSFLHGPELDKGQLRIHRDGIYMVHIQVTLAICSSTTASRHHPTTLAVGICSPASRSISLLRLSFHQGCTIASQRLTPLARGDTLCTNLTGTLLPSRNTDETFFGVQWVRP

SEQ ID NO: 7241 - protein, 294 aa, Artificial Sequence
  source: /note="Description of Artificial Sequence: Synthetic polypeptide"
WTYHYSEKPMNWQRARRFCRDNYTDLVAIQNKAEIEYLEKTLPFSRSYYWIGIRKIGGIWTWVGTNKSLTEEAENWGDGEPNNKKNKEDCVEIYIKRNKDAGKWNDDACHKLKAALCYTASCQPWSCSGHGECVEIINNYTCNCDVGYYGPQCQFVIQCEPLEAPELGTMDCTHPLGNFSFSSQCAFSCSEGTNLTGIEETTCGPFGNWSSPEPTCQVIQCEPLSAPDLGIMNCSHPLASFSFTSACTFICSEGTELIGKKKTICESSGIWSNPSPICQKLDKSFSMIKEGDYN

SEQ ID NO: 7242 - protein, 243 aa, Artificial Sequence
  source: /note="Description of Artificial Sequence: Synthetic polypeptide"
RYLQVSQQLQQTNRVLEVTNSSLRQQLRLKITQLGQSAEDLQGSRRELAQSQEALQVEQRAHQAAEGQLQACQADRQKTKETLQSEEQQRRALEQKLSNMENRLKPFFTCGSADTCCPSGWIMHQKSCFYISLTSKNWQESQKQCETLSSKLATFSEIYPQSHSYYFLNSLLPNGGSGNSYWTGLSSNKDWKLTDDTQRTRTYAQSSKCNKVHKTWSWWTLESESCRSSLPYICEMTAFRFPD

SEQ ID NO: 7243 - protein, 124 aa, Artificial Sequence
  source: /note="Description of Artificial Sequence: Synthetic polypeptide"
KLTRDSQSLCPYDWIGFQNKCYYFSKEEGDWNSSKYNCSTQHADLTIIDNIEEMNFLRRYKCSSDHWIGLKMAKNRTGQWVDGATFTKSFGMRGSEGCAYLSDDGAATARCYTERKWICRKRIH

SEQ ID NO: 7244 - protein, 194 aa, Artificial Sequence
  source: /note="Description of Artificial Sequence: Synthetic polypeptide"
QGHLVHMTVVSGSNVTLNISESLPENYKQLTWFYTFDQKIVEWDSRKSKYFESKFKGRVRLDPQSGALYISKVQKEDNSTYIMRVLKKTGNEQEWKIKLQVLDPVPKPVIKIEKIEDMDDNCYLKLSCVIPGESVNYTWYGDKRPFPKELQNSVLETTLMPHNYSRCYTCQVSNSVSSKNGTVCLSPPCTLARS

SEQ ID NO: 7245 - protein, 133 aa, Artificial Sequence
  source: /note="Description of Artificial Sequence: Synthetic polypeptide"
QVSHRYPRIQSIKVQFTEYKKEKGFILTSQKEDEIMKVQNNSVIINCDGFYLISLKGYFSQEVNISLHYQKDEEPLFQLKKVRSVNSLMVASLTYKDKVYLNVTTDNTSLDDFHVNGGELILIHQNPGEFCVL

SEQ ID NO: 7246 - protein, 149 aa, Artificial Sequence
  source: /note="Description of Artificial Sequence: Synthetic polypeptide"
MQKGDQNPQIAAHVISEASSKTTSVLQWAEKGYYTMSNNLVTLENGKQLTVKRQGLYYIYAQVTFCSNREASSQAPFIASLCLKSPGRFERILLRAANTHSSAKPCGQQSIHLGGVFELQPGASVFVNVTDPSQVSHGTGFTSFGLLKL

SEQ ID NO: 7247 - protein, 205 aa, Artificial Sequence
  source: /note="Description of Artificial Sequence: Synthetic polypeptide"
ACPWAVSGARASPGSAASPRLREGPELSPDDPAGLLDLRQGMFAQLVAQNVLLIDGPLSWYSDPGLAGVSLTGGLSYKEDTKELVVAKAGVYYVFFQLELRRVVAGEGSGSVSLALHLQPLRSAAGAAALALTVDLPPASSEARNSAFGFQGRLLHLSAGQRLGVHLHTEARARHAWQLTQGATVLGLFRVTPEIPAGLPSPRSE

SEQ ID NO: 7248 - protein, 5 aa, Artificial Sequence
  source: /note="Description of Artificial Sequence: Synthetic peptide"
GGGGS

SEQ ID NO: 7249 - protein, 10 aa, Artificial Sequence
  source: /note="Description of Artificial Sequence: Synthetic peptide"
GGGGSGGGGS

SEQ ID NO: 7250 - protein, 15 aa, Artificial Sequence
  source: /note="Description of Artificial Sequence: Synthetic peptide"
GGGGSGGGGSGGGGS

SEQ ID NO: 7251 - protein, 17 aa, Artificial Sequence
  source: /note="Description of Artificial Sequence: Synthetic peptide"
DVPSGPGGGGGSGGGGS

SEQ ID NO: 7252 - protein, 14 aa, Artificial Sequence
  source: /note="Description of Artificial Sequence: Synthetic peptide"
AEAAAKEAAAKAAA

SEQ ID NO: 7253 - protein, 19 aa, Artificial Sequence
  source: /note="Description of Artificial Sequence: Synthetic peptide"
AEAAAKEAAAKEAAAKAAA

SEQ ID NO: 7254 - protein, 390 aa, Homo sapiens
MPPSGLRLLLLLLPLLWLLVLTPGRPAAGLSTCKTIDMELVKRKRIEAIRGQILSKLRLASPPSQGEVPPGPLPEAVLALYNSTRDRVAGESAEPEPEPEADYYAKEVTRVLMVETHNEIYDKFKQSTHSIYMFFNTSELREAVPEPVLLSRAELRLLRLKLKVEQHVELYQKYSNNSWRYLSNRLLAPSDSPEWLSFDVTGVVRQWLSRGGEIEGFRLSAHCSCDSRDNTLQVDINGFTTGRRGDLATIHGMNRPFLLLMATPLERAQHLQSSRHRRALDTNYCFSSTEKNCCVRQLYIDFRKDLGWKWIHEPKGYHANFCLGPCPYIWSLDTQYSKVLALYNQHNPGASAAPCCVPQALEPLPIVYYVGRKPKVEQLSNMIVRSCKCS

SEQ ID NO: 7255 - protein, 414 aa, Homo sapiens
MHYCVLSAFLILHLVTVALSLSTCSTLDMDQFMRKRIEAIRGQILSKLKLTSPPEDYPEPEEVPPEVISIYNSTRDLLQEKASRRAAACERERSDEEYYAKEVYKIDMPPFFPSENAIPPTFYRPYFRIVRFDVSAMEKNASNLVKAEFRVFRLQNPKARVPEQRIELYQILKSKDLTSPTQRYIDSKVVKTRAEGEWLSFDVTDAVHEWLHHKDRNLGFKISLHCPCCTFVPSNNYIIPNKSEELEARFAGIDGTSTYTSGDQKTIKSTRKKNSGKTPHLLLMLLPSYRLESQQTNRRKKRALDAAYCFRNVQDNCCLRPLYIDFKRDLGWKWIHEPKGYNANFCAGACPYLWSSDTQHSRVLSLYNTINPEASASPCCVSQDLEPLTILYYIGKTPKIEQLSNMIVKSCKCS

SEQ ID NO: 7256 - protein, 412 aa, Homo sapiens
MKMHLQRALVVLALLNFATVSLSLSTCTTLDFGHIKKKRVEAIRGQILSKLRLTSPPEPTVMTHVPYQVLALYNSTRELLEEMHGEREEGCTQENTESEYYAKEIHKFDMIQGLAEHNELAVCPKGITSKVFRFNVSSVEKNRTNLFRAEFRVLRVPNPSSKRNEQRIELFQILRPDEHIAKQRYIGGKNLPTRGTAEWLSFDVTDTVREWLLRRESNLGLEISIHCPCHTFQPNGDILENIHEVMEIKFKGVDNEDDHGRGDLGRLKKQKDHHNPHLILMMIPPHRLDNPGQGGQRKKRALDTNYCFRNLEENCCVRPLYIDFRQDLGWKWVHEPKGYYANFCSGPCPYLRSADTTHSTVLGLYNTLNPEASASPCCVPQDLEPLTILYYVGRTPKVEQLSNMVVKSCKCS

SEQ ID NO: 7257 - protein, 503 aa, Homo sapiens
MEAAVAAPRPRLLLLVLAAAAAAAAALLPGATALQCFCHLCTKDNFTCVTDGLCFVSVTETTDKVIHNSMCIAEIDLIPRDRPFVCAPSSKTGSVTTTYCCNQDHCNKIELPTTVKSSPGLGPVELAAVIAGPVCFVCISLMLMVYICHNRTVIHHRVPNEEDPSLDRPFISEGTTLKDLIYDMTTSGSGSGLPLLVQRTIARTIVLQESIGKGRFGEVWRGKWRGEEVAVKIFSSREERSWFREAEIYQTVMLRHENILGFIAADNKDNGTWTQLWLVSDYHEHGSLFDYLNRYTVTVEGMIKLALSTASGLAHLHMEIVGTQGKPAIAHRDLKSKNILVKKNGTCCIADLGLAVRHDSATDTIDIAPNHRVGTKRYMAPEVLDDSINMKHFESFKRADIYAMGLVFWEIARRCSIGGIHEDYQLPYYDLVPSDPSVEEMRKVVCEQKLRPNIPNRWQSCEALRVMAKIMRECWYANGAARLTALRIKKTLSQLSQQEGIKM

SEQ ID NO: 7258 - protein, 507 aa, Homo sapiens
MEAAVAAPRPRLLLLVLAAAAAAAAALLPGATALQCFCHLCTKDNFTCVTDGLCFVSVTETTDKVIHNSMCIAEIDLIPRDRPFVCAPSSKTGSVTTTYCCNQDHCNKIELPTTGPFSVKSSPGLGPVELAAVIAGPVCFVCISLMLMVYICHNRTVIHHRVPNEEDPSLDRPFISEGTTLKDLIYDMTTSGSGSGLPLLVQRTIARTIVLQESIGKGRFGEVWRGKWRGEEVAVKIFSSREERSWFREAEIYQTVMLRHENILGFIAADNKDNGTWTQLWLVSDYHEHGSLFDYLNRYTVTVEGMIKLALSTASGLAHLHMEIVGTQGKPAIAHRDLKSKNILVKKNGTCCIADLGLAVRHDSATDTIDIAPNHRVGTKRYMAPEVLDDSINMKHFESFKRADIYAMGLVFWEIARRCSIGGIHEDYQLPYYDLVPSDPSVEEMRKVVCEQKLRPNIPNRWQSCEALRVMAKIMRECWYANGAARLTALRIKKTLSQLSQQEGIKM

SEQ ID NO: 7259 - protein, 426 aa, Homo sapiens
MEAAVAAPRPRLLLLVLAAAAAAAAALLPGATALQCFCHLCTKDNFTCVTDGLCFVSVTETTDKVIHNSMCIAEIDLIPRDRPFVCAPSSKTGSVTTTYCCNQDHCNKIELPTTGLPLLVQRTIARTIVLQESIGKGRFGEVWRGKWRGEEVAVKIFSSREERSWFREAEIYQTVMLRHENILGFIAADNKDNGTWTQLWLVSDYHEHGSLFDYLNRYTVTVEGMIKLALSTASGLAHLHMEIVGTQGKPAIAHRDLKSKNILVKKNGTCCIADLGLAVRHDSATDTIDIAPNHRVGTKRYMAPEVLDDSINMKHFESFKRADIYAMGLVFWEIARRCSIGGIHEDYQLPYYDLVPSDPSVEEMRKVVCEQKLRPNIPNRWQSCEALRVMAKIMRECWYANGAARLTALRIKKTLSQLSQQEGIKM

SEQ ID NO: 7260 - protein, 567 aa, Homo sapiens
MGRGLLRGLWPLHIVLWTRIASTIPPHVQKSVNNDMIVTDNNGAVKFPQLCKFCDVRFSTCDNQKSCMSNCSITSICEKPQEVCVAVWRKNDENITLETVCHDPKLPYHDFILEDAASPKCIMKEKKKPGETFFMCSCSSDECNDNIIFSEEYNTSNPDLLLVIFQVTGISLLPPLGVAISVIIIFYCYRVNRQQKLSSTWETGKTRKLMEFSEHCAIILEDDRSDISSTCANNINHNTELLPIELDTLVGKGRFAEVYKAKLKQNTSEQFETVAVKIFPYEEYASWKTEKDIFSDINLKHENILQFLTAEERKTELGKQYWLITAFHAKGNLQEYLTRHVISWEDLRKLGSSLARGIAHLHSDHTPCGRPKMPIVHRDLKSSNILVKNDLTCCLCDFGLSLRLDPTLSVDDLANSGQVGTARYMAPEVLESRMNLENVESFKQTDVYSMALVLWEMTSRCNAVGEVKDYEPPFGSKVREHPCVESMKDNVLRDRGRPEIPSFWLNHQGIQMVCETLTECWDHDPEARLTAQCVAERFSELEHLDRLSGRSCSEEKIPEDGSLNTTK

SEQ ID NO: 7261 - protein, 592 aa, Homo sapiens
MGRGLLRGLWPLHIVLWTRIASTIPPHVQKSDVEMEAQKDEIICPSCNRTAHPLRHINNDMIVTDNNGAVKFPQLCKFCDVRFSTCDNQKSCMSNCSITSICEKPQEVCVAVWRKNDENITLETVCHDPKLPYHDFILEDAASPKCIMKEKKKPGETFFMCSCSSDECNDNIIFSEEYNTSNPDLLLVIFQVTGISLLPPLGVAISVIIIFYCYRVNRQQKLSSTWETGKTRKLMEFSEHCAIILEDDRSDISSTCANNINHNTELLPIELDTLVGKGRFAEVYKAKLKQNTSEQFETVAVKIFPYEEYASWKTEKDIFSDINLKHENILQFLTAEERKTELGKQYWLITAFHAKGNLQEYLTRHVISWEDLRKLGSSLARGIAHLHSDHTPCGRPKMPIVHRDLKSSNILVKNDLTCCLCDFGLSLRLDPTLSVDDLANSGQVGTARYMAPEVLESRMNLENVESFKQTDVYSMALVLWEMTSRCNAVGEVKDYEPPFGSKVREHPCVESMKDNVLRDRGRPEIPSFWLNHQGIQMVCETLTECWDHDPEARLTAQCVAERFSELEHLDRLSGRSCSEEKIPEDGSLNTTK

SEQ ID NO: 7262 - protein, 137 aa, Homo sapiens
TIPPHVQKSVNNDMIVTDNNGAVKFPQLCKFCDVRFSTCDNQKSCMSNCSITSICEKPQEVCVAVWRKNDENITLETVCHDPKLPYHDFILEDAASPKCIMKEKKKPGETFFMCSCSSDECNDNIIFSEEYNTSNPD

SEQ ID NO: 7263 - protein, 136 aa, Homo sapiens
IPPHVQKSVNNDMIVTDNNGAVKFPQLCKFCDVRFSTCDNQKSCMSNCSITSICEKPQEVCVAVWRKNDENITLETVCHDPKLPYHDFILEDAASPKCIMKEKKKPGETFFMCSCSSDECNDNIIFSEEYNTSNPD

SEQ ID NO: 7264 - protein, 162 aa, Homo sapiens
TIPPHVQKSDVEMEAQKDEIICPSCNRTAHPLRHINNDMIVTDNNGAVKFPQLCKFCDVRFSTCDNQKSCMSNCSITSICEKPQEVCVAVWRKNDENITLETVCHDPKLPYHDFILEDAASPKCIMKEKKKPGETFFMCSCSSDECNDNIIFSEEYNTSNPD

SEQ ID NO: 7265 - protein, 101 aa, Homo sapiens
QLCKFCDVRFSTCDNQKSCMSNCSITSICEKPQEVCVAVWRKNDENITLETVCHDPKLPYHDFILEDAASPKCIMKEKKKPGETFFMCSCSSDECNDNIIF

SEQ ID NO: 7266 - protein, 93 aa, Homo sapiens
LQCFCHLCTKDNFTCVTDGLCFVSVTETTDKVIHNSMCIAEIDLIPRDRPFVCAPSSKTGSVTTTYCCNQDHCNKIELPTTVKSSPGLGPVEL

SEQ ID NO: 7267 - protein, 79 aa, Homo sapiens
ALQCFCHLCTKDNFTCVTDGLCFVSVTETTDKVIHNSMCIAEIDLIPRDRPFVCAPSSKTGSVTTTYCCNQDHCNKIEL

SEQ ID NO: 7268 - protein, 851 aa, Homo sapiens
MTSHYVIAIFALMSSCLATAGPEPGALCELSPVSASHPVQALMESFTVLSGCASRGTTGLPQEVHVLNLRTAGQGPGQLQREVTLHLNPISSVHIHHKSVVFLLNSPHPLVWHLKTERLATGVSRLFLVSEGSVVQFSSANFSLTAETEERNFPHGNEHLLNWARKEYGAVTSFTELKIARNIYIKVGEDQVFPPKCNIGKNFLSLNYLAEYLQPKAAEGCVMSSQPQNEEVHIIELITPNSNPYSAFQVDITIDIRPSQEDLEVVKNLILILKCKKSVNWVIKSFDVKGSLKIIAPNSIGFGKESERSMTMTKSIRDDIPSTQGNLVKWALDNGYSPITSYTMAPVANRFHLRLENNAEEMGDEEVHTIPPELRILLDPGALPALQNPPIRGGEGQNGGLPFPFPDISRRVWNEEGEDGLPRPKDPVIPSIQLFPGLREPEEVQGSVDIALSVKCDNEKMIVAVEKDSFQASGYSGMDVTLLDPTCKAKMNGTHFVLESPLNGCGTRPRWSALDGVVYYNSIVIQVPALGDSSGWPDGYEDLESGDNGFPGDMDEGDASLFTRPEIVVFNCSLQQVRNPSSFQEQPHGNITFNMELYNTDLFLVPSQGVFSVPENGHVYVEVSVTKAEQELGFAIQTCFISPYSNPDRMSHYTIIENICPKDESVKFYSPKRVHFPIPQADMDKKRFSFVFKPVFNTSLLFLQCELTLCTKMEKHPQKLPKCVPPDEACTSLDASIIWAMMQNKKTFTKPLAVIHHEAESKEKGPSMKEPNPISPPIFHGLDTLTVMGIAFAAFVIGALLTGALWYIYSHTGETAGRQQVPTSPPASENSSAAHSIGSTQSTPCSSSSTA

SEQ ID NO: 7269 - protein, 850 aa, Homo sapiens
MTSHYVIAIFALMSSCLATAGPEPGALCELSPVSASHPVQALMESFTVLSGCASRGTTGLPQEVHVLNLRTAGQGPGQLQREVTLHLNPISSVHIHHKSVVFLLNSPHPLVWHLKTERLATGVSRLFLVSEGSVVQFSSANFSLTAETEERNFPHGNEHLLNWARKEYGAVTSFTELKIARNIYIKVGEDQVFPPKCNIGKNFLSLNYLAEYLQPKAAEGCVMSSQPQNEEVHIIELITPNSNPYSAFQVDITIDIRPSQEDLEVVKNLILILKCKKSVNWVIKSFDVKGSLKIIAPNSIGFGKESERSMTMTKSIRDDIPSTQGNLVKWALDNGYSPITSYTMAPVANRFHLRLENNEEMGDEEVHTIPPELRILLDPGALPALQNPPIRGGEGQNGGLPFPFPDISRRVWNEEGEDGLPRPKDPVIPSIQLFPGLREPEEVQGSVDIALSVKCDNEKMIVAVEKDSFQASGYSGMDVTLLDPTCKAKMNGTHFVLESPLNGCGTRPRWSALDGVVYYNSIVIQVPALGDSSGWPDGYEDLESGDNGFPGDMDEGDASLFTRPEIVVFNCSLQQVRNPSSFQEQPHGNITFNMELYNTDLFLVPSQGVFSVPENGHVYVEVSVTKAEQELGFAIQTCFISPYSNPDRMSHYTIIENICPKDESVKFYSPKRVHFPIPQADMDKKRFSFVFKPVFNTSLLFLQCELTLCTKMEKHPQKLPKCVPPDEACTSLDASIIWAMMQNKKTFTKPLAVIHHEAESKEKGPSMKEPNPISPPIFHGLDTLTVMGIAFAAFVIGALLTGALWYIYSHTGETAGRQQVPTSPPASENSSAAHSIGSTQSTPCSSSSTA

SEQ ID NO: 7270 - protein, 767 aa, Homo sapiens
GPEPGALCELSPVSASHPVQALMESFTVLSGCASRGTTGLPQEVHVLNLRTAGQGPGQLQREVTLHLNPISSVHIHHKSVVFLLNSPHPLVWHLKTERLATGVSRLFLVSEGSVVQFSSANFSLTAETEERNFPHGNEHLLNWARKEYGAVTSFTELKIARNIYIKVGEDQVFPPKCNIGKNFLSLNYLAEYLQPKAAEGCVMSSQPQNEEVHIIELITPNSNPYSAFQVDITIDIRPSQEDLEVVKNLILILKCKKSVNWVIKSFDVKGSLKIIAPNSIGFGKESERSMTMTKSIRDDIPSTQGNLVKWALDNGYSPITSYTMAPVANRFHLRLENNAEEMGDEEVHTIPPELRILLDPGALPALQNPPIRGGEGQNGGLPFPFPDISRRVWNEEGEDGLPRPKDPVIPSIQLFPGLREPEEVQGSVDIALSVKCDNEKMIVAVEKDSFQASGYSGMDVTLLDPTCKAKMNGTHFVLESPLNGCGTRPRWSALDGVVYYNSIVIQVPALGDSSGWPDGYEDLESGDNGFPGDMDEGDASLFTRPEIVVFNCSLQQVRNPSSFQEQPHGNITFNMELYNTDLFLVPSQGVFSVPENGHVYVEVSVTKAEQELGFAIQTCFISPYSNPDRMSHYTIIENICPKDESVKFYSPKRVHFPIPQADMDKKRFSFVFKPVFNTSLLFLQCELTLCTKMEKHPQKLPKCVPPDEACTSLDASIIWAMMQNKKTFTKPLAVIHHEAESKEKGPSMKEPNPISPPIFHGLDTLTV

SEQ ID NO: 7271 - protein, 361 aa, Homo sapiens
LSTCKTIDMELVKRKRIEAIRGQILSKLRLASPPSQGEVPPGPLPEAVLALYNSTRDRVAGESAEPEPEPEADYYAKEVTRVLMVETHNEIYDKFKQSTHSIYMFFNTSELREAVPEPVLLSRAELRLLRLKLKVEQHVELYQKYSNNSWRYLSNRLLAPSDSPEWLSFDVTGVVRQWLSRGGEIEGFRLSAHCSCDSRDNTLQVDINGFTTGRRGDLATIHGMNRPFLLLMATPLERAQHLQSSRHRRALDTNYCFSSTEKNCCVRQLYIDFRKDLGWKWIHEPKGYHANFCLGPCPYIWSLDTQYSKVLALYNQHNPGASAAPCCVPQALEPLPIVYYVGRKPKVEQLSNMIVRSCKCS

SEQ ID NO: 7272 - protein, 394 aa, Homo sapiens
LSTCSTLDMDQFMRKRIEAIRGQILSKLKLTSPPEDYPEPEEVPPEVISIYNSTRDLLQEKASRRAAACERERSDEEYYAKEVYKIDMPPFFPSENAIPPTFYRPYFRIVRFDVSAMEKNASNLVKAEFRVFRLQNPKARVPEQRIELYQILKSKDLTSPTQRYIDSKVVKTRAEGEWLSFDVTDAVHEWLHHKDRNLGFKISLHCPCCTFVPSNNYIIPNKSEELEARFAGIDGTSTYTSGDQKTIKSTRKKNSGKTPHLLLMLLPSYRLESQQTNRRKKRALDAAYCFRNVQDNCCLRPLYIDFKRDLGWKWIHEPKGYNANFCAGACPYLWSSDTQHSRVLSLYNTINPEASASPCCVSQDLEPLTILYYIGKTPKIEQLSNMIVKSCKCS

SEQ ID NO: 7273 - protein, 389 aa, Homo sapiens
LSTCTTLDFGHIKKKRVEAIRGQILSKLRLTSPPEPTVMTHVPYQVLALYNSTRELLEEMHGEREEGCTQENTESEYYAKEIHKFDMIQGLAEHNELAVCPKGITSKVFRFNVSSVEKNRTNLFRAEFRVLRVPNPSSKRNEQRIELFQILRPDEHIAKQRYIGGKNLPTRGTAEWLSFDVTDTVREWLLRRESNLGLEISIHCPCHTFQPNGDILENIHEVMEIKFKGVDNEDDHGRGDLGRLKKQKDHHNPHLILMMIPPHRLDNPGQGGQRKKRALDTNYCFRNLEENCCVRPLYIDFRQDLGWKWVHEPKGYYANFCSGPCPYLRSADTTHSTVLGLYNTLNPEASASPCCVPQDLEPLTILYYVGRTPKVEQLSNMVVKSCKCS

SEQ ID NO: 7274 - protein, 470 aa, Homo sapiens
LQCFCHLCTKDNFTCVTDGLCFVSVTETTDKVIHNSMCIAEIDLIPRDRPFVCAPSSKTGSVTTTYCCNQDHCNKIELPTTVKSSPGLGPVELAAVIAGPVCFVCISLMLMVYICHNRTVIHHRVPNEEDPSLDRPFISEGTTLKDLIYDMTTSGSGSGLPLLVQRTIARTIVLQESIGKGRFGEVWRGKWRGEEVAVKIFSSREERSWFREAEIYQTVMLRHENILGFIAADNKDNGTWTQLWLVSDYHEHGSLFDYLNRYTVTVEGMIKLALSTASGLAHLHMEIVGTQGKPAIAHRDLKSKNILVKKNGTCCIADLGLAVRHDSATDTIDIAPNHRVGTKRYMAPEVLDDSINMKHFESFKRADIYAMGLVFWEIARRCSIGGIHEDYQLPYYDLVPSDPSVEEMRKVVCEQKLRPNIPNRWQSCEALRVMAKIMRECWYANGAARLTALRIKKTLSQLSQQEGIKM

SEQ ID NO: 7275 - protein, 474 aa, Homo sapiens
LQCFCHLCTKDNFTCVTDGLCFVSVTETTDKVIHNSMCIAEIDLIPRDRPFVCAPSSKTGSVTTTYCCNQDHCNKIELPTTGPFSVKSSPGLGPVELAAVIAGPVCFVCISLMLMVYICHNRTVIHHRVPNEEDPSLDRPFISEGTTLKDLIYDMTTSGSGSGLPLLVQRTIARTIVLQESIGKGRFGEVWRGKWRGEEVAVKIFSSREERSWFREAEIYQTVMLRHENILGFIAADNKDNGTWTQLWLVSDYHEHGSLFDYLNRYTVTVEGMIKLALSTASGLAHLHMEIVGTQGKPAIAHRDLKSKNILVKKNGTCCIADLGLAVRHDSATDTIDIAPNHRVGTKRYMAPEVLDDSINMKHFESFKRADIYAMGLVFWEIARRCSIGGIHEDYQLPYYDLVPSDPSVEEMRKVVCEQKLRPNIPNRWQSCEALRVMAKIMRECWYANGAARLTALRIKKTLSQLSQQEGIKM

SEQ ID NO: 7276 - protein, 393 aa, Homo sapiens
LQCFCHLCTKDNFTCVTDGLCFVSVTETTDKVIHNSMCIAEIDLIPRDRPFVCAPSSKTGSVTTTYCCNQDHCNKIELPTTGLPLLVQRTIARTIVLQESIGKGRFGEVWRGKWRGEEVAVKIFSSREERSWFREAEIYQTVMLRHENILGFIAADNKDNGTWTQLWLVSDYHEHGSLFDYLNRYTVTVEGMIKLALSTASGLAHLHMEIVGTQGKPAIAHRDLKSKNILVKKNGTCCIADLGLAVRHDSATDTIDIAPNHRVGTKRYMAPEVLDDSINMKHFESFKRADIYAMGLVFWEIARRCSIGGIHEDYQLPYYDLVPSDPSVEEMRKVVCEQKLRPNIPNRWQSCEALRVMAKIMRECWYANGAARLTALRIKKTLSQLSQQEGIKM

SEQ ID NO: 7277 - protein, 545 aa, Homo sapiens
TIPPHVQKSVNNDMIVTDNNGAVKFPQLCKFCDVRFSTCDNQKSCMSNCSITSICEKPQEVCVAVWRKNDENITLETVCHDPKLPYHDFILEDAASPKCIMKEKKKPGETFFMCSCSSDECNDNIIFSEEYNTSNPDLLLVIFQVTGISLLPPLGVAISVIIIFYCYRVNRQQKLSSTWETGKTRKLMEFSEHCAIILEDDRSDISSTCANNINHNTELLPIELDTLVGKGRFAEVYKAKLKQNTSEQFETVAVKIFPYEEYASWKTEKDIFSDINLKHENILQFLTAEERKTELGKQYWLITAFHAKGNLQEYLTRHVISWEDLRKLGSSLARGIAHLHSDHTPCGRPKMPIVHRDLKSSNILVKNDLTCCLCDFGLSLRLDPTLSVDDLANSGQVGTARYMAPEVLESRMNLENVESFKQTDVYSMALVLWEMTSRCNAVGEVKDYEPPFGSKVREHPCVESMKDNVLRDRGRPEIPSFWLNHQGIQMVCETLTECWDHDPEARLTAQCVAERFSELEHLDRLSGRSCSEEKIPEDGSLNTTK

SEQ ID NO: 7278 - protein, 570 aa, Homo sapiens
TIPPHVQKSDVEMEAQKDEIICPSCNRTAHPLRHINNDMIVTDNNGAVKFPQLCKFCDVRFSTCDNQKSCMSNCSITSICEKPQEVCVAVWRKNDENITLETVCHDPKLPYHDFILEDAASPKCIMKEKKKPGETFFMCSCSSDECNDNIIFSEEYNTSNPDLLLVIFQVTGISLLPPLGVAISVIIIFYCYRVNRQQKLSSTWETGKTRKLMEFSEHCAIILEDDRSDISSTCANNINHNTELLPIELDTLVGKGRFAEVYKAKLKQNTSEQFETVAVKIFPYEEYASWKTEKDIFSDINLKHENILQFLTAEERKTELGKQYWLITAFHAKGNLQEYLTRHVISWEDLRKLGSSLARGIAHLHSDHTPCGRPKMPIVHRDLKSSNILVKNDLTCCLCDFGLSLRLDPTLSVDDLANSGQVGTARYMAPEVLESRMNLENVESFKQTDVYSMALVLWEMTSRCNAVGEVKDYEPPFGSKVREHPCVESMKDNVLRDRGRPEIPSFWLNHQGIQMVCETLTECWDHDPEARLTAQCVAERFSELEHLDRLSGRSCSEEKIPEDGSLNTTK

SEQ ID NO: 7279 - protein, 831 aa, Homo sapiens
GPEPGALCELSPVSASHPVQALMESFTVLSGCASRGTTGLPQEVHVLNLRTAGQGPGQLQREVTLHLNPISSVHIHHKSVVFLLNSPHPLVWHLKTERLATGVSRLFLVSEGSVVQFSSANFSLTAETEERNFPHGNEHLLNWARKEYGAVTSFTELKIARNIYIKVGEDQVFPPKCNIGKNFLSLNYLAEYLQPKAAEGCVMSSQPQNEEVHIIELITPNSNPYSAFQVDITIDIRPSQEDLEVVKNLILILKCKKSVNWVIKSFDVKGSLKIIAPNSIGFGKESERSMTMTKSIRDDIPSTQGNLVKWALDNGYSPITSYTMAPVANRFHLRLENNAEEMGDEEVHTIPPELRILLDPGALPALQNPPIRGGEGQNGGLPFPFPDISRRVWNEEGEDGLPRPKDPVIPSIQLFPGLREPEEVQGSVDIALSVKCDNEKMIVAVEKDSFQASGYSGMDVTLLDPTCKAKMNGTHFVLESPLNGCGTRPRWSALDGVVYYNSIVIQVPALGDSSGWPDGYEDLESGDNGFPGDMDEGDASLFTRPEIVVFNCSLQQVRNPSSFQEQPHGNITFNMELYNTDLFLVPSQGVFSVPENGHVYVEVSVTKAEQELGFAIQTCFISPYSNPDRMSHYTIIENICPKDESVKFYSPKRVHFPIPQADMDKKRFSFVFKPVFNTSLLFLQCELTLCTKMEKHPQKLPKCVPPDEACTSLDASIIWAMMQNKKTFTKPLAVIHHEAESKEKGPSMKEPNPISPPIFHGLDTLTVMGIAFAAFVIGALLTGALWYIYSHTGETAGRQQVPTSPPASENSSAAHSIGSTQSTPCSSSSTA

SEQ ID NO: 7280 - protein, 830 aa, Homo sapiens
GPEPGALCELSPVSASHPVQALMESFTVLSGCASRGTTGLPQEVHVLNLRTAGQGPGQLQREVTLHLNPISSVHIHHKSVVFLLNSPHPLVWHLKTERLATGVSRLFLVSEGSVVQFSSANFSLTAETEERNFPHGNEHLLNWARKEYGAVTSFTELKIARNIYIKVGEDQVFPPKCNIGKNFLSLNYLAEYLQPKAAEGCVMSSQPQNEEVHIIELITPNSNPYSAFQVDITIDIRPSQEDLEVVKNLILILKCKKSVNWVIKSFDVKGSLKIIAPNSIGFGKESERSMTMTKSIRDDIPSTQGNLVKWALDNGYSPITSYTMAPVANRFHLRLENNEEMGDEEVHTIPPELRILLDPGALPALQNPPIRGGEGQNGGLPFPFPDISRRVWNEEGEDGLPRPKDPVIPSIQLFPGLREPEEVQGSVDIALSVKCDNEKMIVAVEKDSFQASGYSGMDVTLLDPTCKAKMNGTHFVLESPLNGCGTRPRWSALDGVVYYNSIVIQVPALGDSSGWPDGYEDLESGDNGFPGDMDEGDASLFTRPEIVVFNCSLQQVRNPSSFQEQPHGNITFNMELYNTDLFLVPSQGVFSVPENGHVYVEVSVTKAEQELGFAIQTCFISPYSNPDRMSHYTIIENICPKDESVKFYSPKRVHFPIPQADMDKKRFSFVFKPVFNTSLLFLQCELTLCTKMEKHPQKLPKCVPPDEACTSLDASIIWAMMQNKKTFTKPLAVIHHEAESKEKGPSMKEPNPISPPIFHGLDTLTVMGIAFAAFVIGALLTGALWYIYSHTGETAGRQQVPTSPPASENSSAAHSIGSTQSTPCSSSSTA

SEQ ID NO: 7281 - protein, 481 aa, Artificial Sequence
  source: /note="Description of Artificial Sequence: Synthetic polypeptide"
  VARIANT (330)..(330): /replace=" "
  SITE (1)..(481): /note="Variant residues given in the sequence have no preference with respect to those in the annotations for variant positions"
ASTKGPSVFPLAPSSKSTSGGTAALGCLVKDYFPEPVTVSWNSGALTSGVHTFPAVLQSSGLYSLSSVVTVPSSSLGTQTYICNVNHKPSNTKVDKRVEPKSCDKTHTCPPCPAPELLGGPSVFLFPPKPKDTLMISRTPEVTCVVVDVSHEDPEVKFNWYVDGVEVHNAKTKPREEQYNSTYRVVSVLTVLHQDWLNGKEYKCKVSNKALPAPIEKTISKAKGQPREPQVCTLPPSREEMTKNQVSLSCAVKGFYPSDIAVEWESNGQPENNYKTTPPVLDSDGSFFLVSKLTVDKSRWQQGNVFSCSVMHEALHNHYTQKSLSLSPGKGGGGSGGGGSGGGGSIPPHVQKSVNNDMIVTDNNGAVKFPQLCKFCDVRFSTCDNQKSCMSNCSITSICEKPQEVCVAVWRKNDENITLETVCHDPKLPYHDFILEDAASPKCIMKEKKKPGETFFMCSCSSDECNDNIIFSEEYNTSNPD

SEQ ID NO: 7282 - protein, 481 aa, Artificial Sequence
  source: /note="Description of Artificial Sequence: Synthetic polypeptide"
  VARIANT (330)..(330): /replace=" "
  SITE (1)..(481): /note="Variant residues given in the sequence have no preference with respect to those in the annotations for variant positions"
ASTKGPSVFPLAPSSKSTSGGTAALGCLVKDYFPEPVTVSWNSGALTSGVHTFPAVLQSSGLYSLSSVVTVPSSSLGTQTYICNVNHKPSNTKVDKRVEPKSCDKTHTCPPCPAPELLGGPSVFLFPPKPKDTLMISRTPEVTCVVVDVSHEDPEVKFNWYVDGVEVHNAKTKPREEQYNSTYRVVSVLTVLHQDWLNGKEYKCKVSNKALPAPIEKTISKAKGQPREPQVYTLPPCREEMTKNQVSLWCLVKGFYPSDIAVEWESNGQPENNYKTTPPVLDSDGSFFLYSKLTVDKSRWQQGNVFSCSVMHEALHNHYTQKSLSLSPGKGGGGSGGGGSGGGGSIPPHVQKSVNNDMIVTDNNGAVKFPQLCKFCDVRFSTCDNQKSCMSNCSITSICEKPQEVCVAVWRKNDENITLETVCHDPKLPYHDFILEDAASPKCIMKEKKKPGETFFMCSCSSDECNDNIIFSEEYNTSNPD

SEQ ID NO: 7283 - protein, 378 aa, Artificial Sequence
  source: /note="Description of Artificial Sequence: Synthetic polypeptide"
  VARIANT (227)..(227): /replace=" "
  SITE (1)..(378): /note="Variant residues given in the sequence have no preference with respect to those in the annotations for variant positions"
DKTHTCPPCPAPELLGGPSVFLFPPKPKDTLMISRTPEVTCVVVDVSHEDPEVKFNWYVDGVEVHNAKTKPREEQYNSTYRVVSVLTVLHQDWLNGKEYKCKVSNKALPAPIEKTISKAKGQPREPQVCTLPPSREEMTKNQVSLSCAVKGFYPSDIAVEWESNGQPENNYKTTPPVLDSDGSFFLVSKLTVDKSRWQQGNVFSCSVMHEALHNHYTQKSLSLSPGKGGGGSGGGGSGGGGSIPPHVQKSVNNDMIVTDNNGAVKFPQLCKFCDVRFSTCDNQKSCMSNCSITSICEKPQEVCVAVWRKNDENITLETVCHDPKLPYHDFILEDAASPKCIMKEKKKPGETFFMCSCSSDECNDNIIFSEEYNTSNPD

SEQ ID NO: 7284 - protein, 378 aa, Artificial Sequence
  source: /note="Description of Artificial Sequence: Synthetic polypeptide"
  VARIANT (227)..(227): /replace=" "
  SITE (1)..(378): /note="Variant residues given in the sequence have no preference with respect to those in the annotations for variant positions"
DKTHTCPPCPAPELLGGPSVFLFPPKPKDTLMISRTPEVTCVVVDVSHEDPEVKFNWYVDGVEVHNAKTKPREEQYNSTYRVVSVLTVLHQDWLNGKEYKCKVSNKALPAPIEKTISKAKGQPREPQVYTLPPCREEMTKNQVSLWCLVKGFYPSDIAVEWESNGQPENNYKTTPPVLDSDGSFFLYSKLTVDKSRWQQGNVFSCSVMHEALHNHYTQKSLSLSPGKGGGGSGGGGSGGGGSIPPHVQKSVNNDMIVTDNNGAVKFPQLCKFCDVRFSTCDNQKSCMSNCSITSICEKPQEVCVAVWRKNDENITLETVCHDPKLPYHDFILEDAASPKCIMKEKKKPGETFFMCSCSSDECNDNIIFSEEYNTSNPD

SEQ ID NO: 7285 - protein, 481 aa, Artificial Sequence
  source: /note="Description of Artificial Sequence: Synthetic polypeptide"
  VARIANT (481)..(481): /replace=" "
  SITE (1)..(481): /note="Variant residues given in the sequence have no preference with respect to those in the annotations for variant positions"
IPPHVQKSVNNDMIVTDNNGAVKFPQLCKFCDVRFSTCDNQKSCMSNCSITSICEKPQEVCVAVWRKNDENITLETVCHDPKLPYHDFILEDAASPKCIMKEKKKPGETFFMCSCSSDECNDNIIFSEEYNTSNPDGGGGSGGGGSGGGGSASTKGPSVFPLAPSSKSTSGGTAALGCLVKDYFPEPVTVSWNSGALTSGVHTFPAVLQSSGLYSLSSVVTVPSSSLGTQTYICNVNHKPSNTKVDKRVEPKSCDKTHTCPPCPAPELLGGPSVFLFPPKPKDTLMISRTPEVTCVVVDVSHEDPEVKFNWYVDGVEVHNAKTKPREEQYNSTYRVVSVLTVLHQDWLNGKEYKCKVSNKALPAPIEKTISKAKGQPREPQVCTLPPSREEMTKNQVSLSCAVKGFYPSDIAVEWESNGQPENNYKTTPPVLDSDGSFFLVSKLTVDKSRWQQGNVFSCSVMHEALHNHYTQKSLSLSPGK

SEQ ID NO: 7286 - protein, 481 aa, Artificial Sequence
  source: /note="Description of Artificial Sequence: Synthetic polypeptide"
  VARIANT (481)..(481): /replace=" "
  SITE (1)..(481): /note="Variant residues given in the sequence have no preference with respect to those in the annotations for variant positions"
IPPHVQKSVNNDMIVTDNNGAVKFPQLCKFCDVRFSTCDNQKSCMSNCSITSICEKPQEVCVAVWRKNDENITLETVCHDPKLPYHDFILEDAASPKCIMKEKKKPGETFFMCSCSSDECNDNIIFSEEYNTSNPDGGGGSGGGGSGGGGSASTKGPSVFPLAPSSKSTSGGTAALGCLVKDYFPEPVTVSWNSGALTSGVHTFPAVLQSSGLYSLSSVVTVPSSSLGTQTYICNVNHKPSNTKVDKRVEPKSCDKTHTCPPCPAPELLGGPSVFLFPPKPKDTLMISRTPEVTCVVVDVSHEDPEVKFNWYVDGVEVHNAKTKPREEQYNSTYRVVSVLTVLHQDWLNGKEYKCKVSNKALPAPIEKTISKAKGQPREPQVYTLPPCREEMTKNQVSLWCLVKGFYPSDIAVEWESNGQPENNYKTTPPVLDSDGSFFLYSKLTVDKSRWQQGNVFSCSVMHEALHNHYTQKSLSLSPGK

SEQ ID NO: 7287 - protein, 257 aa, Artificial Sequence
  source: /note="Description of Artificial Sequence: Synthetic polypeptide"
IPPHVQKSVNNDMIVTDNNGAVKFPQLCKFCDVRFSTCDNQKSCMSNCSITSICEKPQEVCVAVWRKNDENITLETVCHDPKLPYHDFILEDAASPKCIMKEKKKPGETFFMCSCSSDECNDNIIFSEEYNTSNPDGGGGSGGGGSGGGGSGQPKANPTVTLFPPSSEELQANKATLVCLISDFYPGAVTVAWKADGSPVKAGVETTKPSKQSNNKYAASSYLSLTPEQWKSHRSYSCQVTHEGSTVEKTVAPTECS

SEQ ID NO: 7288 - protein, 258 aa, Artificial Sequence
  source: /note="Description of Artificial Sequence: Synthetic polypeptide"
IPPHVQKSVNNDMIVTDNNGAVKFPQLCKFCDVRFSTCDNQKSCMSNCSITSICEKPQEVCVAVWRKNDENITLETVCHDPKLPYHDFILEDAASPKCIMKEKKKPGETFFMCSCSSDECNDNIIFSEEYNTSNPDGGGGSGGGGSGGGGSRTVAAPSVFIFPPSDEQLKSGTASVVCLLNNFYPREAKVQWKVDNALQSGNSQESVTEQDSKDSTYSLSSTLTLSKADYEKHKVYACEVTHQGLSSPVTKSFNRGEC

SEQ ID NO: 7289 - protein, 10 aa, Artificial Sequence
  source: /note="Description of Artificial Sequence: Synthetic peptide"
GFNIKSAYMH

SEQ ID NO: 7290 - protein, 11 aa, Artificial Sequence
  source: /note="Description of Artificial Sequence: Synthetic peptide"
SESVDSYGNSF

SEQ ID NO: 7291 - protein, 27 aa, Artificial Sequence
  source: /note="Description of Artificial Sequence: Synthetic peptide"
  SITE (2)..(26): /note="This region may encompass 2-5 'Glu Ala Ala Ala Lys' repeating units"
AEAAAKEAAAKEAAAKEAAAKEAAAKA

SEQ ID NO: 7292 - protein, 32 aa, Artificial Sequence
  source: /note="Description of Artificial Sequence: Synthetic polypeptide"
GIPDQFSGSNSGNIATLTISKAQAGYEADYYC

SEQ ID NO: 7293 - protein, 10 aa, Artificial Sequence
  source: /note="Description of Artificial Sequence: Synthetic peptide"
QSWDSTNSAV

SEQ ID NO: 7294 - protein, 107 aa, Artificial Sequence
  source: /note="Description of Artificial Sequence: Synthetic polypeptide"
SYTLTQPPLLSVALGHKATITCSGERLSDKYVHWYQQKPGRAPVMVIYENDKRPSGIPDQFSGSNSGNIATLTISKAQAGYEADYYCQSWDSTNSAVFGSGTQLTVL

SEQ ID NO: 7295 - protein, 118 aa, Artificial Sequence
  source: /note="Description of Artificial Sequence: Synthetic polypeptide"
QIQLQESGPGLVKPSQSLSLSCSVTGFSINTGGYHWNWIRQFPGKKVEWMGYIYSSGTTKYNPSLKSRISITRDTSKNQFFLQLNSVTTEDTATYYCARGDWHYFDYWGQGTMVAVSS

SEQ ID NO: 7296 - protein, 107 aa, Artificial Sequence
  source: /note="Description of Artificial Sequence: Synthetic polypeptide"
SYTLTQPPLVSVALGQKATIICSGENLSDKYVHWYQQKPGRAPVMVIYENDKRPSGIPDQFSGSNSGNIATLTISKAQAGYEADYYCHCWDSTNSAVFGSGTHLTVL

SEQ ID NO: 7297 - protein, 118 aa, Artificial Sequence
  source: /note="Description of Artificial Sequence: Synthetic polypeptide"
QIQLQESGPGLVKPSQSLSLTCSVTGFSINTGGYHWNWIRQFPGKKLEWMGYIYSSGSTRYNPSLKSRFSITRDTSKNQFFLQLNSVTTEDTATYYCTRGNWHYFDYWGQGTLVAVSS

SEQ ID NO: 7298 - protein, 118 aa, Artificial Sequence
  source: /note="Description of Artificial Sequence: Synthetic polypeptide"
QIQLQESGPGLVKPSQSLSLSCSVTGFSITTTGYHWNWIRQFPGKKLEWMGYIYSSGSTSYNPSLKSRFSITRDTSKNQFFLQLNSVTTEDTATYYCARGDWHYFDYWGPGTMVTVSS

SEQ ID NO: 7299 - protein, 107 aa, Artificial Sequence
  source: /note="Description of Artificial Sequence: Synthetic polypeptide"
SFTLTQPPLVSVAVGQVATITCSGEKLSDKYVHWYQQKPGRAPVMVIYENDRRPSGIPDQFSGSNSGNIASLTISKAQAGDEADYFCQFWDSTNSAVFGGGTQLTVL

SEQ ID NO: 7300 - protein, 118 aa, Artificial Sequence
  source: /note="Description of Artificial Sequence: Synthetic polypeptide"
QIQLQESGPGLVKPSQTLSLTCTVSGFSITTTGYHWNWIRQHPGKGLEWIGYIYSSGSTSYNPSLKSLVTISRDTSKNQFSLKLSSVTAADTAVYYCARGDWHYFDYWGQGTMVTVSS

SEQ ID NO: 7301 - protein, 118 aa, Artificial Sequence
  source: /note="Description of Artificial Sequence: Synthetic polypeptide"
QIQLVESGGGLVKPGGSLRLSCAVSGFSITTTGYHWNWIRQAPGKGLEWVGYIYSSGSTSYNPSLKSRFTISRDTAKNSFYLQMNSLRAEDTAVYYCARGDWHYFDYWGQGTMVTVSS

SEQ ID NO: 7302 - protein, 118 aa, Artificial Sequence
  source: /note="Description of Artificial Sequence: Synthetic polypeptide"
EIQLLESGGGLVQPGGSLRLSCAVSGFSITTTGYHWNWVRQAPGKGLEWVGYIYSSGSTSYNPSLKSRFTISRDTSKNTFYLQMNSLRAEDTAVYYCARGDWHYFDYWGQGTMVTVSS

SEQ ID NO: 7303 - protein, 118 aa, Artificial Sequence
  source: /note="Description of Artificial Sequence: Synthetic polypeptide"
EIQLVESGGGLVQPGGSLRLSCAVSGFSITTTGYHWNWVRQAPGKGLEWVGYIYSSGSTSYNPSLKSRFTISRDTAKNSFYLQMNSLRAEDTAVYYCARGDWHYFDYWGQGTMVTVSS

SEQ ID NO: 7304 - protein, 118 aa, Artificial Sequence
  source: /note="Description of Artificial Sequence: Synthetic polypeptide"
QIQLVQSGAEVKKPGASVKVSCKVSGFSITTTGYHWNWVRQAPGQGLEWMGYIYSSGSTSYNPSLKSRVTMTRDTSTNTFYMELSSLRSEDTAVYYCARGDWHYFDYWGQGTMVTVSS

SEQ ID NO: 7305 - protein, 107 aa, Artificial Sequence
  source: /note="Description of Artificial Sequence: Synthetic polypeptide"
SSETTQPPSVSVSPGQTASITCSGEKLSDKYVHWYQQKPGQSPVMVIYENDRRPSGIPERFSGSNSGNTATLTISGTQAMDEADYFCQFWDSTNSAVFGGGTQLTVL

SEQ ID NO: 7306 - protein, 107 aa, Artificial Sequence
  source: /note="Description of Artificial Sequence: Synthetic polypeptide"
SSETTQPHSVSVATAQMARITCSGEKLSDKYVHWYQQKPGQDPVMVIYENDRRPSGIPERFSGSNPGNTATLTISRIEAGDEADYFCQFWDSTNSAVFGGGTQLTVL

SEQ ID NO: 7307 - protein, 107 aa, Artificial Sequence
  source: /note="Description of Artificial Sequence: Synthetic polypeptide"
QSVTTQPPSASGTPGQRVTISCSGEKLSDKYVHWYQQLPGTAPKMLIYENDRRPSGVPDRFSGSNSGNSASLAISGLRSEDEADYFCQFWDSTNSAVFGGGTQLTVL

SEQ ID NO: 7308 - protein, 107 aa, Artificial Sequence
  source: /note="Description of Artificial Sequence: Synthetic polypeptide"
QSVTTQPPSVSGAPGQRVTISCSGEKLSDKYVHWYQQLPGTAPKMLIYENDRRPSGVPDRFSGSNSGNSASLAITGLQAEDEADYFCQFWDSTNSAVFGGGTQLTVL

SEQ ID NO: 7309 - protein, 108 aa, Artificial Sequence
  source: /note="Description of Artificial Sequence: Synthetic polypeptide"
DSVTTQSPLSLPVTLGQPASISCSGEKLSDKYVHWYQQRPGQSPRMLIYENDRRPSGVPDRFSGSNSGNDATLKISRVEAEDVGVYFCQFWDSTNSAVFGGGTKVEIK

SEQ ID NO: 7310 - protein, 245 aa, Artificial Sequence
  source: /note="Description of Artificial Sequence: Synthetic polypeptide"
EIQLLESGGGLVQPGGSLRLSCAVSGFSITTTGYHWNWVRQAPGKGLEWVGYIYSSGSTSYNPSLKSRFTISRDTSKNTFYLQMNSLRAEDTAVYYCARGDWHYFDYWGQGTMVTVSSGGGGSGGGGSGGGGSGGGGSSSETTQPPSVSVSPGQTASITCSGEKLSDKYVHWYQQKPGQSPVMVIYENDRRPSGIPERFSGSNSGNTATLTISGTQAMDEADYFCQFWDSTNSAVFGGGTQLTVL

SEQ ID NO: 7311 - protein, 246 aa, Artificial Sequence
  source: /note="Description of Artificial Sequence: Synthetic polypeptide"
EIQLLESGGGLVQPGGSLRLSCAVSGFSITTTGYHWNWVRQAPGKGLEWVGYIYSSGSTSYNPSLKSRFTISRDTSKNTFYLQMNSLRAEDTAVYYCARGDWHYFDYWGQGTMVTVSSGGGGSGGGGSGGGGSGGGGSDSVTTQSPLSLPVTLGQPASISCSGEKLSDKYVHWYQQRPGQSPRMLIYENDRRPSGVPDRFSGSNSGNDATLKISRVEAEDVGVYFCQFWDSTNSAVFGGGTKVEIK

SEQ ID NO: 7312 - protein, 32 aa, Artificial Sequence
  source: /note="Description of Artificial Sequence: Synthetic polypeptide"
QIQLQESGPGLVKPSQSLSLSCSVTGFSINTG

SEQ ID NO: 7313 - protein, 5 aa, Artificial Sequence
  source: /note="Description of Artificial Sequence: Synthetic peptide"
GYHWN

SEQ ID NO: 7314 - protein, 14 aa, Artificial Sequence
  source: /note="Description of Artificial Sequence: Synthetic peptide"
WIRQFPGKKVEWMG

SEQ ID NO: 7315 - protein, 8 aa, Artificial Sequence
  source: /note="Description of Artificial Sequence: Synthetic peptide"
GDWHYFDY

SEQ ID NO: 7316 - protein, 11 aa, Artificial Sequence
  source: /note="Description of Artificial Sequence: Synthetic peptide"
WGQGTMVAVSS

SEQ ID NO: 7317 - protein, 32 aa, Artificial Sequence
  source: /note="Description of Artificial Sequence: Synthetic polypeptide"
QIQLQESGPGLVKPSQSLSLTCSVTGFSINTG

SEQ ID NO: 7318 - protein, 16 aa, Artificial Sequence
  source: /note="Description of Artificial Sequence: Synthetic peptide"
YIYSSGSTRYNPSLKS

SEQ ID NO: 7319 - protein, 32 aa, Artificial Sequence
  source: /note="Description of Artificial Sequence: Synthetic polypeptide"
RFSITRDTSKNQFFLQLNSVTTEDTATYYCTR

SEQ ID NO: 7320 - protein, 22 aa, Artificial Sequence
  source: /note="Description of Artificial Sequence: Synthetic peptide"
SYTLTQPPLVSVALGQKATIIC

SEQ ID NO: 7321 - protein, 10 aa, Artificial Sequence
  source: /note="Description of Artificial Sequence: Synthetic peptide"
HCWDSTNSAV

SEQ ID NO: 7322 - protein, 32 aa, Artificial Sequence
  source: /note="Description of Artificial Sequence: Synthetic polypeptide"
QIQLQESGPGLVKPSQSLSLSCSVTGFSITTT

SEQ ID NO: 7323 - protein, 32 aa, Artificial Sequence
  source: /note="Description of Artificial Sequence: Synthetic polypeptide"
RFSITRDTSKNQFFLQLNSVTTEDTATYYCAR

SEQ ID NO: 7324 - protein, 11 aa, Artificial Sequence
  source: /note="Description of Artificial Sequence: Synthetic peptide"
WGPGTMVTVSS

SEQ ID NO: 7325 - protein, 22 aa, Artificial Sequence
  source: /note="Description of Artificial Sequence: Synthetic peptide"
SFTLTQPPLVSVAVGQVATITC

SEQ ID NO: 7326 - protein, 11 aa, Artificial Sequence
  source: /note="Description of Artificial Sequence: Synthetic peptide"
SGEKLSDKYVH

SEQ ID NO: 7327 - protein, 7 aa, Artificial Sequence
  source: /note="Description of Artificial Sequence: Synthetic peptide"
ENDRRPS

SEQ ID NO: 7328 - protein, 32 aa, Artificial Sequence
  source: /note="Description of Artificial Sequence: Synthetic polypeptide"
GIPDQFSGSNSGNIASLTISKAQAGDEADYFC

SEQ ID NO: 7329 - protein, 10 aa, Artificial Sequence
  source: /note="Description of Artificial Sequence: Synthetic peptide"
QFWDSTNSAV

SEQ ID NO: 7330 - protein, 32 aa, Artificial Sequence
  source: /note="Description of Artificial Sequence: Synthetic polypeptide"
QIQLQESGPGLVKPSQTLSLTCTVSGFSITTT

SEQ ID NO: 7331 - protein, 32 aa, Artificial Sequence
  source: /note="Description of Artificial Sequence: Synthetic polypeptide"
QIQLVESGGGLVKPGGSLRLSCAVSGFSITTT

SEQ ID NO: 7332 - protein, 32 aa, Artificial Sequence
  source: /note="Description of Artificial Sequence: Synthetic polypeptide"
EIQLLESGGGLVQPGGSLRLSCAVSGFSITTT

SEQ ID NO: 7333 - protein, 32 aa, Artificial Sequence
  source: /note="Description of Artificial Sequence: Synthetic polypeptide"
EIQLVESGGGLVQPGGSLRLSCAVSGFSITTT

SEQ ID NO: 7334 - protein, 32 aa, Artificial Sequence
  source: /note="Description of Artificial Sequence: Synthetic polypeptide"
QIQLVQSGAEVKKPGASVKVSCKVSGFSITTT

SEQ ID NO: 7335 - protein, 22 aa, Artificial Sequence
  source: /note="Description of Artificial Sequence: Synthetic peptide"
SSETTQPPSVSVSPGQTASITC

SEQ ID NO: 7336 - protein, 32 aa, Artificial Sequence
  source: /note="Description of Artificial Sequence: Synthetic polypeptide"
GIPERFSGSNSGNTATLTISGTQAMDEADYFC

SEQ ID NO: 7337 - protein, 32 aa, Artificial Sequence
  source: /note="Description of Artificial Sequence: Synthetic polypeptide"
GIPERFSGSNPGNTATLTISRIEAGDEADYFC

SEQ ID NO: 7338 - protein, 32 aa, Artificial Sequence
  source: /note="Description of Artificial Sequence: Synthetic polypeptide"
GVPDRFSGSNSGNSASLAISGLRSEDEADYFC

SEQ ID NO: 7339 - protein, 32 aa, Artificial Sequence
  source: /note="Description of Artificial Sequence: Synthetic polypeptide"
GVPDRFSGSNSGNSASLAITGLQAEDEADYFC

SEQ ID NO: 7340 - protein, 23 aa, Artificial Sequence
  source: /note="Description of Artificial Sequence: Synthetic peptide"
DSVTTQSPLSLPVTLGQPASISC

SEQ ID NO: 7341 - protein, 15 aa, Artificial Sequence
  source: /note="Description of Artificial Sequence: Synthetic peptide"
WYQQRPGQSPRMLIY

SEQ ID NO: 7342 - protein, 32 aa, Artificial Sequence
  source: /note="Description of Artificial Sequence: Synthetic polypeptide"
GVPDRFSGSNSGNDATLKISRVEAEDVGVYFC

SEQ ID NO: 7343-7370 - skipped (28 entries)

SEQ ID NO: 7371 - protein, 32 aa, Artificial Sequence
  source: /note="Description of Artificial Sequence: Synthetic polypeptide"
QIQLQESGPGLVKPSETLSLTCTVSGFSINTG

SEQ ID NO: 7372 - protein, 32 aa, Artificial Sequence
  source: /note="Description of Artificial Sequence: Synthetic polypeptide"
QIQLQESGPGLVKPSQTLSLTCTVSGFSINTG

SEQ ID NO: 7373 - protein, 32 aa, Artificial Sequence
  source: /note="Description of Artificial Sequence: Synthetic polypeptide"
EIQLLESGGGLVQPGGSLRLSCAVSGFSINTG

SEQ ID NO: 7374 - protein, 32 aa, Artificial Sequence
  source: /note="Description of Artificial Sequence: Synthetic polypeptide"
QIQLVQSGAEVKKPGSSVKVSCKVSGFSINTG

SEQ ID NO: 7375 - protein, 32 aa, Artificial Sequence
  source: /note="Description of Artificial Sequence: Synthetic polypeptide"
EIQLVESGGGLVQPGGSLRLSCAVSGFSINTG

SEQ ID NO: 7376 - protein, 32 aa, Artificial Sequence
  source: /note="Description of Artificial Sequence: Synthetic polypeptide"
QIQLVQSGAEVKKPGASVKVSCKVSGFSINTG

SEQ ID NO: 7377 - protein, 32 aa, Artificial Sequence
  source: /note="Description of Artificial Sequence: Synthetic polypeptide"
QIQLVESGGGLVKPGGSLRLSCAVSGFSINTG

SEQ ID NO: 7378 - protein, 32 aa, Artificial Sequence
  source: /note="Description of Artificial Sequence: Synthetic polypeptide"
EIQLVQSGAEVKKPGATVKISCKVSGFSINTG

SEQ ID NO: 7379-7384 - skipped (6 entries)

SEQ ID NO: 7385 - protein, 16 aa, Artificial Sequence
  source: /note="Description of Artificial Sequence: Synthetic peptide"
YIYSSGTTKYNPSLKS

We claim:

1. A multifunctional molecule, comprising:
(i) a first antigen binding domain that binds to, e.g., selectively binds to, T cell receptor variable beta (TCRBV), e.g., a TCRBV antigen,
and
(ii) one, two, or all of:
(a) an immune cell engager chosen from an NK cell engager, a T cell engager, a B cell engager, a dendritic cell engager, or a macrophage cell engager;
(b) a cytokine molecule or cytokine inhibitor molecule; and
(c) a death receptor signal engager.

2. A multifunctional molecule, comprising:
(i) a first antigen binding domain that binds to, e.g., selectively binds to, T cell receptor variable beta (TCRBV), e.g., a TCRBV antigen, and
(ii) an NK cell engager, e.g., an anti-NKp30, anti-NKp46, anti-NKG2D, or anti-CD16 antibody molecule.

3. The multifunctional molecule of claim 2, wherein the NK cell engager comprises an anti-NKp30 antibody molecule.

4. The multifunctional molecule of claim 2, wherein the NK cell engager comprises an anti-NKp46 antibody molecule.

5. A multifunctional molecule, comprising:
(i) a first antigen binding domain that binds to, e.g., selectively binds to, T cell receptor variable beta (TCRBV), e.g., a TCRBV antigen, and
(ii) a death receptor signal engager.

6. A multifunctional molecule, comprising:
(i) a first antigen binding domain that binds to, e.g., selectively binds to, T cell receptor variable beta (TCRBV), e.g., a TCRBV antigen, and
(ii) a cytokine inhibitor molecule.

7. A nucleic acid molecule encoding the multifunctional molecule of any one of claims 1-6.

8. A vector, e.g., an expression vector, comprising the nucleic acid molecules of claim 7.

9. A host cell comprising the nucleic acid molecule of claim 7 or the vector of claim 8.

10. A method of making, e.g., producing, the multifunctional molecule or antibody molecule of any one of claims 1-6, comprising culturing the host cell of claim 9, under suitable conditions, e.g., conditions suitable for gene expression and/or homo- or heterodimerization.

11. A pharmaceutical composition comprising the multifunctional molecule of any one of claims 1-6 and a pharmaceutically acceptable carrier, excipient, or stabilizer.

12. A method of treating a TCR bias, comprising administering to a subject in need thereof the multifunctional molecule of any one of claims 1-6, wherein the multifunctional molecule is administered in an amount effective to treat the TCR bias.

13. A method of treating an autoimmune disease (e.g., an autoimmune disease associated with a TCR bias), comprising administering to a subject in need thereof the multifunctional molecule of any one of claims 1-6, wherein the multifunctional molecule is administered in an amount effective to treat the autoimmune disease.

14. A method of treating a TCR bias, comprising:
responsive to determining that a subject has a TCR bias, administering to a subject in need thereof the multifunctional molecule of any one of claims 1-6, wherein the multifunctional molecule is administered in an amount effective to treat the TCR bias.

15. A method of treating an autoimmune disease (e.g., an autoimmune disease associated with a TCR bias), comprising:
responsive to determining that a subject has an autoimmune disease (e.g., an autoimmune disease associated with a TCR bias), administering to a subject in need thereof the multifunctional molecule of any one of claims 1-6, wherein the multifunctional molecule is administered in an amount effective to treat the autoimmune disease (e.g., an autoimmune disease associated with a TCR bias).

16. A method of identifying a subject in need of treatment for cancer using a multifunctional molecule of any of claims 1-6, comprising determining (e.g., directly determining or indirectly determining, e.g., obtaining information regarding) whether a subject has a TCR bias (e.g., a biased TCRBV clonotype) and/or an autoimmune disease associated with said bias, wherein:
responsive to determining that the subject has a TCR bias (e.g., a biased TCRBV clonotype) and/or an autoimmune disease associated with said bias, identifying the subject as a candidate for treatment using a multifunctional molecule comprising an antigen binding domain that binds to the TCRBV antigen, and optionally not as a candidate for treatment using a multifunctional molecule comprising an antigen binding domain that does not bind to the TCRBV antigen (e.g., that binds to a different TCRBV antigen).

17. A method of evaluating a subject in need of treatment for a TCR bias (e.g., a biased TCRBV clonotype) and/or an autoimmune disease associated with said bias, comprising determining (e.g., directly determining or indirectly determining, e.g., obtaining information regarding) whether a subject has a TCR bias.

18. A method of treating an autoimmune disease (e.g., an autoimmune disease associated with a TCR bias), in a subject in need thereof, comprising administering to said subject an effective amount, e.g., a therapeutically effective amount, of an antibody molecule which binds (e.g., specifically binds) to a T cell receptor beta variable region (TCRβV) (“anti-TCRβV antibody molecule”), thereby treating the disorder.

19. A method of depleting a population of T cells in a subject having an autoimmune disorder (e.g., an autoimmune disease associated with a TCR bias), comprising, contacting the T cell population with an effective amount of an antibody molecule which binds (e.g., specifically binds) to a T cell receptor beta variable region (TCRβV) (“anti-TCRβV antibody molecule”).

20. The method of claim 19, wherein the contacting occurs in vivo or in vitro.

21. The method of any one of claims 18-20, wherein the anti-TCRβV antibody molecule:
(i) is not an antibody molecule disclosed in U.S. Pat. No. 5,861,155;
(ii) binds to TCRβ V12 with an affinity and/or binding specificity that is less than (e.g., less than about 10%, 20%, 30%, 40%, 50%, 60%, 70%, 80%, 90% or about 2-, 5-, or 10-fold) the affinity and/or binding specificity of the 16G8 murine antibody or a humanized version thereof as described in U.S. Pat. No. 5,861,155;
(iii) binds to TCRβ V12 with an affinity and/or binding specificity that is greater than (e.g., greater than about 10%, 20%, 30%, 40%, 50%, 60%, 70%, 80%, 90% or about 2-, 5-, or 10-fold) the affinity and/or binding specificity of the 16G8 murine antibody or a humanized version thereof as described in U.S. Pat. No. 5,861,155;
(iii) binds to TCRβ V5-5*01 or TCRβ V5-1*Ol with an affinity and/or binding specificity that is greater than (e.g., greater than about 10%, 20%, 30%, 40%, 50%, 60%, 70%, 80%, 90% or about 2-, 5-, or 10-fold) the affinity and/or binding specificity of the TM23 murine antibody or a humanized version thereof as described in U.S. Pat. No. 5,861,155 or
(iv) binds to TCRβ V5-5*01 or TCRβ V5-1*01 with an affinity and/or binding specificity that is greater than (e.g., greater than about 10%, 20%, 30%, 40%, 50%, 60%, 70%, 80%, 90% or about 2-, 5-, or 10-fold) the affinity and/or binding specificity of the TM23 murine antibody or a humanized version thereof as described in U.S. Pat. No. 5,861,155.

22. The method of any one of claims 18-21, wherein the anti-TCRβV antibody molecule comprises an Fc region, e.g., an Fc region having effector function, e.g., antibody dependent cell-mediated cytotoxicity (ADCC), Antibody-dependent cellular phagocytosis (ADCP) and/or complement dependent cytotoxicity (CDC).

23. The method of any claim 22, wherein the anti-TCRβV antibody molecule comprises an Fc region with enhanced effector function, e.g., as compared to a wildtype Fc region.

24. The method of any one of claims 18-23, wherein the anti-TCRβV antibody molecule comprises a human IgG1 region or a human IgG4 region.
